United States Patent Application Publication US 2026/0062700 A1 - sequence listing, part 6

SEQ ID NO: 13672 - RNA, 1296 nt, synthetic construct
  source 1..1296: mol_type = other RNA
atgaccgagcccgctctgacttgggctgatgttgcagccgctggcggaatccgagaatgggtggatgcagaagttgctagacagggccttgcaagtactggcgtgcctcctaacatgactgatgccgagaagaagctttttaaggctagaagagacgaggaaaggcgcgtgcgcaaagaactttacaagcgggcctggtcggcttataagcgggctcatattgtgcacctgggtccaggcgttttttggcacgatacagccgacgtggaccgcttcgatgcagacgaccccgaaaaaaaacggcaggataacgccctgcctaaactggccgatgtcgaagccttcgcaaaagccgtcggtgtagacattccacgtctcagatggctgtcttaccaccgggaagttgactccgggactcattaccgccgttggacggtcccgaagagagacggcacagcccgacttattagcgcccctaagcccgacttgaagcgcattcagcggtggatcacaacggaggtcaccgagcatttacccgtgcatggagctgcacacggcttcattaccgggcggagcatcgtgagtaacgcgagagtacacgctggtgctcatgtcgtggttaaactcgatataagagggttttaccctactgtgactatgcggagggtcaaagggctacttagacgagcaggcctaggggaacaggtagctacactcatggcgctgctggcaaccgaatccccaagggaggaggtggagacacacggaaaagttcactatgtggccatcgggccacgctcattgccacaaggggcacccacctccccgtctattaccaatgcgctgtgtctccgtctggattgcaggctcgcaggcttagctcggaagctcggatgcaggtatacccgatatgccgacgacctgaccttcagctggcacggcgatggaaaggccgccataggctctctgttgagggccacgaccatgattgtcagggccgaaggttttgagatccatactaagaagaccagagtgatgcgcaagggtgcgagacagaaagtcacagggttggtggtgaatgaggcacaagggaggccaacagctcgggtgcctcgcacaactcagcgagagctccgagccgccatccgtaatagggagttaggcaggcccggaaaaggcgaatcactggaggagctgaagggaatggccgcattcataatgatgaccgatcgggagaggggacgcgcctttatggaacggatcgacaaactgatcgcggctagagaggtaaagtga

SEQ ID NO: 13673 - RNA, 1197 nt, synthetic construct
  source 1..1197: mol_type = other RNA
atgaccgacgctgagaataagctctacaaagccaggcgggatgaggagcgcaaagtgcgaagggagctgtacagaagggcctggcaagcctaccgaagggctcacgtggttcacttaggcgctggcgtgttctggcacgacacggcagatgtagatcgcttcgacgccgatgatccagaaaaacggcgccaagactctgccctgccctccttggacgatgttgctgcactggctggcgcgctaggattgtcaatcccacgcttacggtggctggcctatcaccgggacgtggacaccggtacacactatcatcgctggtgggtgccgaaaagagacgggagcaagagattgatctcggcaccaaaaccggagctgaaggccgtgcaacggtggattactcgggaggtgactgaacatcttcccgtccacggggcagcacatggctttctggtggggcgcagcatcgtgagtaatgcccgcgtgcacgccggtgcacgagtgatagttaaactggatattcggggattttatcctaccatctctatgaggcgggtcaagggcctgttaagacgcgctgggttgggagagcaggtagccaccgtcatggcccttctggctacagaaagcccccgagagcaggtagccacccatgggaagacctacttcgttgccactggtcctcggtccttgccccagggagctcctacttctccaagcattacgaacgcactgtgcctgcgtctggactgcaggctcagtgggctcgccaggaagctgggttgtcggtatacccggtacgcagacgaccttacattttcatggcatggtgatgccagaccacaggtcggcgcgttactcagaggggtggccatgatcgtcagggctgaaggctttgaagtgcacgccaagaaaacgagagtgatgcgcgcaggagcgaggcagaaggttacaggcctcgtggtaaaccaggcacccgcggaaaggcctactacccgcgtccctcgtgttacacagagagccctacgagcagccataaagaacagagaacttggcagatccggaaaaggcgagacactcgagcagctgaagggaatggctgccttcgtcatgatgactgacgctgctcgtgggagggcacttatggcgagactggatcgtctcattgccgctcgagatcaggctggcggacaaccctga

SEQ ID NO: 13674 - RNA, 1305 nt, synthetic construct
  source 1..1305: mol_type = other RNA
atgtctgagcctgtgcgtccgcccgttcgatgggcagatattgccgccactgggggcattcgtgagtgggttgacgccgaaatcactaggcagggtctgtctgaccctggcgccggaaatctgagcgatgcggagaaaaaagtctataaagcacgtagggaggaggagcggagggtgagacgagagctgtacaaacaagcctgggcagcttatagacagactcatattgtgcacttggggagaggcgtcttctggcacgacaccgccgacgtggatcgatttgatgccgatgaccctgaaaagaaacgaagggacaatgcccttcccgaactaaaagatgtcgaagctctttcccaagctctgggccttagcgtggcgcgtctcaggtggctggcctatcaccgcgaagtggacacagggacgcactatcacagatggcggatccccaagagggacggaaccccacggctgataagtgcgcccaagccccagctcaaagaggctcagagatggataacacgggaaatcacggagcatctgccagtgcactccgcagcccacggcttccttgtcggtcgctcgatcgttagcaatgcccgggtacatgctggggcacgcgtgattgtaaagatggacatagagggtttttaccctaccgtgaccttcccacgggtgaaaggtttgctgcggaaggcaggactgggagaacaggtagcaacactcctggcattgctcgccacagagagcccccgcgaagagcttgtgttagagggaaagacagtctttgtagcaaccggcccacgctctttaccccaaggagcccctacatcccctagtattaccaacgctctttgcctgaggctcgattgtcggctatttgggctggctagagctctcggggccaggtacaccagatacgcggacgatttaaccttcagtttccatggcccggctggagaggtcgaccatgtgggaactctactgaaggcagtgacccggatcgtggctgcggaaggctttgccatcaagcctaagaagacgcgggtcatgcgatcaggtgccaggcagcgggttactggcctcgtggttaacgccgctcccggacgaccgttggcaagagtctcaagacagcagttgagggagctgcgcgcagctatcaagaacagagaactcggccgcccaggcaaaggggaatccctggatcagctgagggggatggctgccttcgttatgatgactgaccgcgagcgcggccgcatgttactcgataggattaacagactggccgccccaacagaaccatga

SEQ ID NO: 13675 - RNA, 1344 nt, synthetic construct
  source 1..1344: mol_type = other RNA
atgacagcaggcgcgaaactggccgctgtgccatgggcagaagtggctgcagcaggaggcatcaggccctgggtcgatgctgcgttagcccgtcagggattagccgaccccggcgtaccgtcttccatgagcgacggcgagaaaaaggcttacaaagccaggcgagaggaggagaggcgggttagacgcgaactgttcagagtggcttgggccgcatacaaggcagtgcacattgtgcatgtaggtgccggcgtgtggtggcacgacacaccagatgtcgaccgttttgacgcggcagaacccgagcggaaacgggctgatgccgatctgccagctttgcctgatgtcgaagccctggccaaagccctcgggttgtctatcgcccgccttcggtggttgagctaccaccgcgaggtggatacgggcacacactatcagagatggacggtgcccaagagagacggaggcgtgcgtcccatcaccgcaccaaaacctactctaaaggctgcacagcgatggatcgcacgctccattaccgaacatctccccgttcacggtgcagcccatgggtttctgccaggccggagtatcgccacaaatgccgtagttcatgcaggggccaagatcatagtcaagcttgacatcgaggggttttaccctactgtaacctatcggcgagttaaagggctcctgaggaagggggcagggttaggcgagcaagtggctaccctgctggctttgatggctacagaggctcctagggaggagttgctcgtgaggggccggacctgttatgtcgcaactggccctagggccttaccacagggggctccaacctcaccctccattaccaacgccctgtgcctcaggctcgacgggagactaaccggtcttgccaggtcgctgggatgccgctatacacgctacgctgatgatatgaccttcagttggcacggaggtgctgctggccaggcagatcggactaatgctataggcaagcttctgcgggctgtggagatgatcgtggccgccgagggctttacgattaagcggactaaaacccgggtgatgcgcggagggggtagacaacaggtcacagggctggttgtcaatcaagccgacggacgaccgcctgccagagttccacgagcgactcagcgcaacctcagggctgccataaagaacagagaactgggccgacccggacgcggtgaaagcattgaagccctgcgtggcatggccgccttcgtgatgatgactgacccggccagaggaagggcgttcatggcgagaattgacagacttgcggaaagggcaggaggtgcacctgccggatcagaatga

SEQ ID NO: 13676 - RNA, 1221 nt, synthetic construct
  source 1..1221: mol_type = other RNA
atgtccgatgccgaaaagaaagcttataaggcgcggcgcgatgaagaaaggcgagtgcggcgcgaactctttcgtgtggcctgggccgcttacaaggccgctcacatagtgcacctgggacccggggtatggtggcacgataccgctgacgtcgatcgcttcgacgctgccgacccagcaaaaaagcagcaggataacgcactccctgcactccccgatgtcgaggcactggctaaagccttaggcctgtcaattgcccggctgcgctggctttcgtaccatcgcgaggtcgacactggcacacactatcatagatggactgttcccaaacgggacggcggcctcagacccattagcgcacctaaacctgagttgaaggccgcccagcgttggatcgccagacaggtgaccgaacacctgcccgtacacggagccgctcatggctttcttccaggcagaagtattgcgacaaacgccggagtacatgccggcgccaagataatcgtgaagcttgacatcgagggattttacccgacagtgacgtggaggcgcgtcaaagggctgctgcggaaagccggactgggggaacaagtggccactatcatggcgctagttgcaaccgaggccccacgcgaagaactggtggtgcgtggcagaccatgcttcgtggccacaggacctcgagccttacctcaaggggcccccacatctccgtccatcaccaatgcattgtgcctcagacttgactgtcgcttgactgggcttgcgaggaagctaggagctaggtacacccggtatgccgacgacctgacctttagctggcacggcgatgctgctagagcagcggatgcaggcaatgcaatcggaaaactcttgcgggcagtcactgagattgtggcagcggaggggttcaccattaagcggaccaaaacgagggtcatgcgggcagggggtaggcaacaggttactggactggtggttaaccaggccgatggtaggccggcagctcgagttccccgtgctacacagcgaaagctgagggctgccctgaagaatcgcgagttgggtcgacctggccatggcgagacactggaggctttaagagggatggcagcgttcatcatgatgacggacccagagagggggagagcattcatggcccggatagaccgactcgctcagagggctggtgaagccccagctggttctgagagagcctga

SEQ ID NO: 13677 - RNA, 1332 nt, synthetic construct
  source 1..1332: mol_type = other RNA
atggctaacgatacgcagacacccccagttagcgcggtaccggctgacctacccaagtgggccgatatcgaagccgccgggaatattaggtcttgggtggacgctgaactgaccagactcggtctgtttgagccgggagttgatacatctactctgagcgacaaacagcggaaggcctacaaggcaaagagagaacaggagcgcaaggtgagaagggaactgatggcaaaggcttggttcgtctacaggcagcaccatctggtgcacgtgggggtcggcgtttggtaccatgataccgccgacatagatcgctgggacatacccgatttggagggccgcagacagctcaacgaactccccgaactcgagaatgttcacgcactcgccaaatctctcggccttgcgatcccccggttgagatggctggtgtatcatcgagaggtggataccgggactcattaccaccgctggacagtgcccaagaggtcgggcaagggggtacgccttatcagtgccccaaaacctgacctgaaaagagtgcagagctggattgcccgaaacattacagagcatctgccggtgcatggagcagcccatggttttcttgcaggcaggagtacactatccaatgctcgtgtccacgctggcgcaagagtcattgtgaaattcgacgtacgggatttctatcctacggtcgtgttgcgtcgtgtgaaagggttgttcagaaaggctggatacggtgaacaggtcgccacagtcctcgcattgctgtgcaccgagtgtcccagggaggagatcgagctgggcggtaggcctcactatgtggccactggaccacgctccctaccccaaggagccccaacttcacccagcatcacgaataccctgtgcctgaacttagacgctaggctgacaggcctcgcagccaagcttggcttccggtacactcggtatgccgacgacctgaccttctcatttcacggccctgcgggccacaagattgcggttggacggctgcaaaaggccgtagtggatatcgtcgcagacgaagggtttatagtgcaccctcacaaaacccgggtgatgcgaagtgggggccgacagaaggtgaccggtcttgtagtcaataccgcacctgaaggagagcctgtggcgagagtgccacggaaagtcgttagggaattacgcgctgctattcacaaccgagcacagggaaagccagggaaaggcgagactttagagcaactgcgcggtatggctgcctatgttcatatgtgtgatcctgccaaaggagctgcctttatgcaacagatcaactccctgccagggtga

SEQ ID NO: 13678 - RNA, 1308 nt, synthetic construct
  source 1..1308: mol_type = other RNA
atggccaatgacaacgccaccactaccactgcaggaccagcatggagcgagattgaggccgccggcaacctgaggaattgggtggatgccgaactggaacggagggggttacgagatcccggcgtcgacacatcacggctgaacgataaacagagaaaggcctacaagactaaaagggaagaagagagaaaggtaaggcgtgagctcatggctcaggcgtggaaggtttaccgccagcaccatttggttcatattggcgtaggcgtctggtaccacgatacagctgacatcgatagatgggacatcgcagatctcgaggggagacgggctataaatgaactgcctgaattgaaggacgtgcacgcactggccaaaatactggaactgccaatcccacgacttcgctggcttatttatcatcgagaggtggacacgggcacccactatcacaggtggactgtccctaaacgatccggtaaggggcggcggctgatttctgctcctaagcctgacttgaaacggtgccagacgtgggtcgcgaggaacatctccgagcatctcccggtgcatggggctgcacacggatttctcgcaggcaggagtacactctctaacgccaaagtgcacgccggggccaaggtagtggtaaaattcgacgtgcgtgatttctaccccaccgtttcttacagaagggtgaagggactgtttaggaaggccgggtacggagagcaggttgctacggtgctggcactgctctgcacagagtgcccccgcgaagaaatcgaaattggggggagagtccattacgtggccacaggcgtgcgttcattaccccagggtgccccaactagtcccagcctaacaaacgcactgtgtgtccggctagacgcgaggcttaccggactggcaagcaagttgggctttaggtatactcgctatgccgacgacttaaccttctcgttccacggcgagggtaaagttccagtggctcgcttgcgacgagccgttgtggatattgtggctgcggaggggtttgaggtgcaccccgataagacccgggtcatgagatccggtggacgccaaaaagtgaccggactagtgatcaatggcgcccctgagggaagacctgaggcacgtgtcccgcgcaaggtcatacgcgaactgagagctgctatccataatcgggagcaaggtaaagccggcaagggagagagccttgatcagctgagaggtcttgcagcttatgttcacatgtgtgatccagaaaaaggccgcgcgttcatggcccggatcgacaagctcgcttga

SEQ ID NO: 13679 - RNA, 1347 nt, synthetic construct
  source 1..1347: mol_type = other RNA
atggcaaatgacacaagttcgactaccgccaccacagctgatggaccggagtgggctgacattgaagcagcagggagcatccggaactgggtcgacgccgaactggacagaaggggcctgctcgacgatggagccgatacgtctcgtatgagcgacaaacaacggaaggcttacaagacaaaaagagaagaagaacgggtcttgagaagaaaactgatggcccagggctgggcctgctacaggcagaataaactggtccacgtgggggtgggagtctggtaccacgacactgcggacatagataggtgggatattgccgatctagacggtaggcggcagctcaatgagctgcccgaactgaaagatgtgcatgccctcgccaaggtacttgagctggccatgccacggctccgctggcttgtgtatcatagagaggtggattccggcacccactaccaccgttggacagtccctaagagatcaggcaagggggtgcgactcatctccgcaccgaaaccagaattgaagaggtgtcaaacttggatcgcacggaacatcagtgagcatctgcctgtgcacggagcagctcacggtttcctcgcgggtcgctcaacccttacaaacgctgccgctcatgctggggcggaggttgtggtgaaatttgatgtgcgagacttctatccaactgtgactttcaggcgagtgaaagggctcttccgaaaggcaggctatggggagcaggtagcgattgtgctggccctactgtgtaccgaatgcccccgggagactatcgagatcgggggtcggacctaccacgtagcaaccggaccccgatctttacctcagggcgcccccacgtctcccagcataacaaacgctttatgcatgagactggacgctagactgaccgggttggcccgcaagctggggtttcggtatactcgttacgccgatgatcttacgttctcatatcatcgcggagagggcggtgaaggcgaacaggagacaggtaagattcctgttgcccgtctgaggaaggctgtgaccgaaatcgtcgccagtgagggctttagagttcatgaaggcaagacccgcgttatgcggagcggcggaaggcagaaggtgacagggctggttgtgaacggggcaggagagggagtaccaaccgccagggttccccgcaaactagtcagggagctccgagccgcgataagaaatcgcgagttgggcaagcctggcaaaggagaatcccttgagcaattacgcggttgggcagcttacgtccacatgtgtgacccatccaagggcagggcatttattgcccgcctggagaaattggctgagtga

SEQ ID NO: 13680 - RNA, 1314 nt, synthetic construct
  source 1..1314: mol_type = other RNA
atggctaacgataccacagccgaggtggaaggcacacctcctaaatgggccgatattgaggcggcaggtaatatccgcaactgggtggatgctgaactcgagcgaagaggcctgcgagatcccggggtggataccagcagactgtccgataaacagaggaaagcatacaaggctaaacgcgaggaggagaggcgtgtgcgacgggttctgcaaggtcaagcctggcaggtttacagacagaatcacctggttcatgtcggtgtgggcgtctggtatcacgatactgctgacattgatagatgggatatcgctggaatagacgaaagaagggaattaaacgaacttcccgagctcaaggacgtccacgccctagccaaggctctggagctgcctatcccaaagctccgttggcttgtatatcaccgggaggttgacaccgggactcattatcagcgttggactgtaccaaagcgcagtggcaaaggcgtgcggctgattagtgctccgaagccgaccctgaagcggtgtcagacttgggtggccaggaatattacagaacacctgcccgtgcatggggcagctcacggatttctcacaggacgcagcacggtcactaacgcagcggtacatgctggcgcacgcgtggtcgtgaagttcgacgtgaaggacttctacccaactgtctcatttagaagggtgaaggggatgatgcgaaaggccgggtacggtgaacaggtggccactgtgttagcgctgcttaccacggagtgtcctcgggagagcatcgaactccatgggagaacccattatgtcgccacaggcccaaggtcattaccccagggggctcccacatctccttccatcaccaatgctctgtgcttgaggcttgactcgcgcctcaccggcctagcacgcaaattgggattccgctacacgagatatgcggatgaccttaccttcagcttccacggagccggaaagatcccagtaggccggttgcagaaggccgttgccgacattgtgaaagacgaagggtttatcatacacccccacaaaacaagagtgatgcggaagggaggacgccagaaggtcaccggcctcgttattaatggcgcacctgagggtgctgccaaggcaagagtgcccaggaaagtcgttcgtgagttgcgggccgccatcaggaaccgagagttgggaaaaccagggaaaggcgaatctctggaacaactgaggggtatggccgcctacattcatatgtgcgacccggcaaagggcaaagcatttctggaccggataaacgcgctgtcttcctga

SEQ ID NO: 13681 - RNA, 1329 nt, synthetic construct
  source 1..1329: mol_type = other RNA
atggcagacagccatgatagcaccgaggtgtcacttccggagtggaaaggcattgcagaggccggaggaattgagtcgtggatccaccgcgaactggaaaggcgccagctgatcgaagaagtcgattacgcttccctcagcaaggctgagaagaaggcatacaaggccagacgggatgaagaacggcgcgttaggcgactccttagaaaacacgcatggcaggcgtataaaaaagcacatgtggtccatctgggccgtggcgttttctaccacgacacacctgactacgatcggtatgatattgatgggcgggaggagaggttagccgacaacgccctccccgaaattgccgatgccagcgctctggcagaagccctggggatcacggttcccacaatgcgttggctggcctaccacagggaggtcgattccggcacccactacaggcgatggacagtcccaaagagggatgggcgtcgacgcttgatctctgagccaaaaccccagctgaaggaagcacaacgctggatcgctcgcgagattaccgatcatctccctgtgcacggagcggcgcacggttttttagccggcagatctaccgtgaccaacgctgctgtacatgccggcgcgcggattgttgtcaagctagacctcaaagactattatcctacgatcactacacccagggtgaagggtatgttcagaaaagctggctatggcgagcaggtagccacattgctggctatgctgtgcactgaaagtcccagagaggagatcgaactcgacgggaagacctggtatgtggcgactggaccccggtccttgccacaaggagccccaacgagcccctcaataaccaacgcaatatccctgagactggacctcaggctagccgggctggctaggaaaatgggttttagatacaccagatatgccgacgacttgacattctcacaccaccagcgttccgaagctcctatcggttctctgttccgccttgtgggccagatagtggtggaggaggggtttgaagtgcatcctaagaagactcgagtcatgaggagtggaagccgacagaaggtgactggcctggtggttaatggggcagacggagctcctgcagcacgggtaccaagatctgtccggagaaaactgcgggccgctattaagaatcgcgagttaggccgaccgggcgaaggtgagtcattggctcaactgcgcggatgggccgcctacgtgtacatgactgatccagccaaaggaagggcactccttgaccggcttgccgccttggggggtgagagtgatgagggaggcacagacgggtga

SEQ ID NO: 13682 - RNA, 1302 nt, synthetic construct
  source 1..1302: mol_type = other RNA
atgacgactgccgccgaggataaactaccagactgggcaggaatcgcagccgagggagggattgatgcctgggtcaggagtgagctgatgcgccgagacttgatcgacgatagggataccacacagctttctgagcgcgagaagaaacagtataaagcccggcgtgaggaagagaggagagtgcgtcggctgctccagaaacacgcgtggggggcatatcgggccgcacatgtcgtgcatgtgggagtcggggtgttctaccatgacacacccgacattgatcgcttcgatatcgacgaccccggggccaggagggttttaaatgatttacctgagttggcagacgctacgacactggccgctagactggaactgactatccctcgcatgcgatggttggcctaccatcgggaagtggattctgggacgcactaccacagatggaaagtgccaaagcggtccggaggagagcgcctcatttcagcacccaagcccgaactcaagagagtgcagcattggatagccgagcacatcactgagcaccttccagttcatgccgccgcccatggctttatggcaggaagatctaccgtgagcaatgctgccgcccatgctggtgctaggtgcgtggtgaaaatggatctagaagacttctacccaaccataaccaccccgagagtgaagggcatgttccggaaggctgggtacggcgaacaggtcgctaccttgctcgcgctgctggtgactgaaagcccacgagaagaggtgcctattgacggcaagacatttcacgtagccgttggagcccgatccttgcctcagggtgcccctacctccccgtccattaccaatgccatctgtctgcgtctggatacaagactgatggcactctgccgtgtactgggctttacatatactcggtacgcggacgacttgaccttcagttggcaccaagagggcgacgctcctgtaggccaccttctgcgagctgttggtggcatagtgaccgatgagggctttcgggtgcacagaaagaagactagggtcatgcgccaaggaaggaggcagaagatcacaggactggtcgttaacggggcacacgatgttcccgcaagggtccccaggctggtaatccgccaacttagagctgccattaaaaaccgagagctcggccgcgaaggtagaggcgagtcgcttgctgaactgcgggggatggctgcatatgtcaacatgagcgacccaactaaaggccgggcttttttacagagactcgcggcgctcagcaagcgcggtgaatcatga

SEQ ID NO: 13683 - RNA, 1338 nt, synthetic construct
  source 1..1338: mol_type = other RNA
atgtccgactctaccgccgataagcaaagaaccgagtggcgctccattgccgaagccggtggaactgatgcttgggtgcatcaggagctgcttcggcaaggcctgatagacgaaggcgttgacaccgctagcatgggtgataaggagcgtaaagcctacaaggccagacgtgaggaagagaggcgcgtccggaagatcctgagaaaggatgcatgggccgcatatcggcgggcccaccttgttcatgttgggacaggtgtgttttatcatgacactgccgatatagatcggtttgacatcgatgaccccgagcagcgacgccagcaaaatgacttgcccgccctggctacagcgcaggacttagcccaggccctggatctgcctatgccacgacttagatggctcgtgtatcaccgagaggtcgacacgggctctcattatcacttctggacggtgcccaagagaagcggcggagaacggctcatttctgcaccgaagccggacctcaagaaagcacagcgttggattgctgagcacatctcagaaaggttgcctattcacggggcggctcatgggtttgtggctggcaggtccactgttactaacgccagactccacgctggagcggctgtagttgtgaaattcgatctggaagccttctacccaaccatcacattccctagggtgaaagggctgtttcgaaaggccggctacggggaacaagtcgccaccgtgcttgcccttctgtgtacagagagtcctcgagagcaggtcgctctcaagggcaaactctattacgtcgccgtagggcctagatcattgccccagggggccccaacaagcccatccataaccaacgccatttgccttcgcctggacgccagattggctggcctagctagggcagcaggatggcggtactctaggtacgctgatgatctgactttttcatggcacagaagagacgcagcggctccagtaggtcggctgatgcgcatgttggggcgaatcggatcagacgagggcttcgcactgcaccgcaagaaaacccgggtgttacgcagtggacgcaggcagaaagtatgcggcctggtggtgaacgctgcaggagatggacagcctagggcccgtgtgcccaggaaaattgtccgcgaactgcgggccgccatcaggaatcgcgaactgggccgggaagggtgggatgagagcctagcagagctcgcaggtatggcgtcctacgtgcatatggcggaccccaagaaaggaagggctttcctcgacagaatcgcagccttacaggctgcaggccagcaatcgggtggcgaggtcagtagctga

SEQ ID NO: 13684 - RNA, 1353 nt, synthetic construct
  source 1..1353: mol_type = other RNA
atgacggagtcaagtaccccacctagctctgagtatatcgatctacccgaatggactgccatagccgcaaaaggcggaattcactattggatccaagaggaacttgctaagaaaggtctgctcgacgaccaggcgccctcttccccatctgttagagagaagaagcagtacagagcgcggcgggatgaagaaagacgggtgcggcgaagactcgctcagcatgcctgggcagcttatcgacgtgcccacctagtgcacgtagggctggacgttttttaccatgataccccagacattgaccgctacgatgtggtggatccacctgctcggcgcgccacaaattctgtccccgagattccggatgcccgtcgtctggctgagatactcgaccttcccatgcctcgcctgcgctggctggtcttccacagagaggtcgactctgggacgcactaccacaggtggaccatccctaaacgcgacggcagtgaacggctcattagcgcccccaagccagagcttaaaagagtgcagaaatggatatcacaacagatcactgagcacctaccagtgcatggcgcagcccatggatttctggccgctagaagtactgtgacctgtgcccaggtgcatgcaggggcaagggtactcgtgaaaaccgatttgaaggacttctatcctacaatcactttcccccgggtgaaaggcatcttccgcaaggccggctacggcgaacaggttgcgacactgctcgccttactctgcaccgaatgccctagggataagatagtgagggcaaacaaaacgtactatgtggctgtcggtcctcgctccttaccccagggagctccgacatcccccagcttgaccaacgtgacatgtttcagattggacgaccgcctgacagggttggccaagaagtttggggtttgctacacacgatacgctgatgatttgacttttagttggcacactcccggagaggcctcagtgggtctgcttctcggcattatcagggggatcgtgaccgacgagggattcgagctgcaccctaataaaacccagattttatcgagcggtaggagacaaaaagtcactggactggtcgttaaccgctccgacgcagatgtaagcgtgagggtaccgcggaaggtcgtcaggcagctgcgaagcgctattaagaatcgtgaaaacgacagagatggaccagaatccctggctcagctgaagggcatggcagcctatatccatatggccgatccagttaagggcaggcaatttcttgagaggatcgcgcagctggaagcacggcaaaccgttgccgtggggtcagaaatggcagaccgagtcgagtga

SEQ ID NO: 13685 - RNA, 1371 nt, synthetic construct
  source 1..1371: mol_type = other RNA
atgaccgagcccaaccagtcgacccagaatcccacaggatccgtcggcggaggctcatctgagctgtccgttcgggttccggattgggctgccgtggtagaagctggaggacgggacgcctttattgaaagggagctgctccgcttagggctggtggatgaatcaaccgagcccgggaagcttagtgattccgaaaagaaagctttcaaagctaggcgagaggaggagcgtagagtaaggcgggaattggataaagctacatgggcttcttacagggccgctcatattctccacctgggagcaggagtcttctactccgaaggaattgatatagacagattcgatctcgacgatcccaaggctaggcgcgacgccaatggcctgccagacatcgcaaacgcacaggccctggcgaagctcctggggatatctatgtttcgccttcgacagttgacgtatcaccgggacgtggatagcggtagcaactatatccgctggatgattccaaagcgtagcggtgggctacggttaatcagcgccccaaagaaggaacttaaacgcattcagcgtttcgtggccaaagaaatcgtcgagcatttacccatgcatggcagtagccacggttttgtaagaggacggtccactcggagcaatgccattaagcatgcaaaagccgaagtgattattaagctggacttgtcttcattctacccaactatcacattccctcgagtgaagggccttttcaggaaagcgggctatcaggagaagatagccaccctgctggcactccttgtcactgagtcccccagagaggaacgccacgtggagaacaggacatactatgtcgccaacggcccaaggtcactccctcaaggcgcacccacgtctcctgcgataactaatactctttgtctgagactggatagtcggctcgacgggctgtgcgcaaagtggggtctggtgtacactaggtacgccgatgacctcacatttagtgccaaaaaggggagcaaagtccacgtggggaaggccatcggcgcagttaagagaatcgtgtcggaggaggggtttgtggtccacccagccaaaacaagaatcatgcggggcggtcgccgtcaaaaggtaaccgggctggtggttaatgccgcacctggcgcccctctagctcgagttcctcggaagctggtgagaagactgagggcggcaatcaccaaccgcgaaagaaataaacctctcagggagggagctgaaacgatcgagcagctaagaggctatgcggcttacgtggccatgaccgacccaccgaaaggaaaagcatttttggaccgaatcaaccgcttggctgagcgagaacccaccgctggttga

SEQ ID NO: 13686 - RNA, 1332 nt, synthetic construct
  source 1..1332: mol_type = other RNA
atgtcacagacgaacgatcctttgacggggcaagcactggttgcccctctggactggggggcagtgaaggaggcaggtggaagggaaaactttattgataaagagctcgcaagacgaggcctgactgactccagcgatccaagcgtgctgggggattccgaaaaaaaaagttttaaggctagacgcgaggaggaacggcgggtacggaaggagctcgagaaagccgtctgggccgcctacagagctgctcatattgttcatcttggctctggcgttttcttcaatgacgctatcgacatcgacaagtatgacctggaggatcctaaaggtcggcgtgaggctaacgaccttccagacatcccatcccccgcagaactggccaaagtcctgggcattagtatgcggaggttgaggcagctgaccttccacagagatgtggattcaggcaccaattacgtccgttggactattccgaagcgcaccggggccctgcgtctcattagtgccccaaagaaagaactgaaacgtgcccagcggtggataaacagagagatcgttgaacacctacccgtccacggtgccgcacatggattcgtgcggggtcggtcaacccttactaacgcgacaccgcacgcgagagccgaggtaatcgtgaaactggacctcagcgacttctaccctaccatcacatttccccgggtgaagggcctcttccggaaagcagggtaccaggagcgcatcgctacactgctggcactgctggtgacagaatctcctagggacacacgagtgctaagcgggcgcacatattatgtcgccaatggacccagatctctcccacagggagcccccacatctccagcaataactaatgccttgtgccttcgattggatgccaggcttgacgggcttgctagaaagttcaaggtggaatatactagatacgccgacgatctgaccttttccgcgcagcgtggcacgactcccgatttaggccgcttcctgggagcggtgaaacgagttgtgcgcgaggaaggttttctcgtgcacccaaagaaaacccgaattatgaggggcggcaggcgacaaaaggtgaccggactagtggtaaacgcagccaagggaaggcccgtagctagagctcctaggaagttggtccgggcattgagggctgctatcactaatcgcgaacgcggcaagcaagccggacccgaaaccctcgagcagctcagagggtatgctgcctacgtctcgatgaccgatcctgctagagggaaggcgtttttagagcgcatactgaggttagccgatcgcggaggcgccgagaggtga

SEQ ID NO: 13687 - RNA, 1410 nt, synthetic construct
  source 1..1410: mol_type = other RNA
atgagcgagcaacctcagacccatacacccgatggagccgaggcagcagcaccacctcctccaccaccaccagcaccagccgcatctccacctgaagcggctcccaggctgacttgggatgtgatcgccgaggacggaggcatacgcggctggatagatgccgagcttcgccggagggacctggttgatgacggggtcgatacccagtcgatgtcagacaaacagaggaagcggtacaaggcacgccgcgagcaggaacgtcgggttagacgagaactgcgcaagcaagcttgggcatgttacagagaagcccacctcgtgcacttaggagccagtgtgttctaccacgacacaccggacgtcgacagatatgacatcgccgaacccgaagaacggctgcgcgagaacgatctgcctcttttgaaagatgccagagccttggctgatgctctgcatctcagcgtcccccgattacgctggctaacctttcacagagaggtggattctggctcacactatgttcggtggaccatcccgaagaggagcggtgggacaaggctgattagcagtccgaagcgtgatttgaaggacgcgcaacggttcatcgctaggaaaatctccgaacacctccctgtgcactccgcggcacatggctttctcggagggcgtagtaccgtgacgaatgcccgagcgcatgctggagcggaggtggttatcaagctggatatcaaagacttctatcccacagtcaccatgcccagagtgaaggggatgtttcgcaaagccggatacggggagcaggtggccactgtactagctctgctgtgcacggatgcacctagggaggccatgctgctccgtggccagacacggtacgtagctacaggaccacgtagcctaccgcagggcgcacctacatcaccatccattactaacgctatttgccttcggatggactctcgcctctcaggcttggcccgaaaactcgggtttaggtatacccgatacgccgacgatctgaccttcagctggcatgacggaaaaaagcccgctcccgtaggtatgctgcttggcggcgttcggaagattgtctccagtgaaggtttcgtggtgcatcccaacaaaactagagtcatgcggaaaggtagggctcagcgggtaacggggttagtggtcaatgctgcgggtgaaggagctgcacccgccagagtgcctcgcaagcttgtgcgcaggcttagggctgccatacacaatcgggagagagggaaggccagagagggcgaaactctggcacaattggccggctgggccgcctatctgaacatgactgaccctgagagagcccagcccatgctcgctcgaattcacaggctgatgcgaggcgagagagactcttcttccggggagtga

SEQ ID NO: 13688 - RNA, 1308 nt, synthetic construct
  source 1..1308: mol_type = other RNA
atgagcgcagagattcagaccaccacaccggccacagctgaacccatccccccatgggcatcggtaagagaggccggaggtatcagggagtgggtcgaggccgagcttgctcgaagagggctcatagaatcagtggacaccagcgcactgagtgcagagcagaagaagcagtttaaggcccgcagggatgaagaacgccgagtgcggcgtctgttgaggaaggccgcatgggcttcctataagagagcccacctagttcacctcggggcaggcatctttcatcacgataccgctgacctggatcggtttgacgccgatgatcccgaagccagacgcaaagataacgacctacccgaactggccgatgcgcaggctttggcagccgctctcggcttgccaatccccacccttcgctggctggccttccatcgggaagtggacaccggtacccactatcatagatggacagtgcctaagaggtccggaggagcgaggctcataagtgctcctaaaaagactctgaaaaccgcgcagaagtggattgctacaaacattgtggagcatctgccagtccatggagctgcccacggattccttccgggacggtctacgaagacaaatgccgaggttcatgtcggcgcccggttggtcgtgaagctggaccttagtgacttctaccccactatcactttagagagagtgaaagggctgttccggaaagcgggttatggcgaacaggtggcaacggtgctcgccctgctctgcaccgagtctccaagggaggccatttcactgcgtggcaggacgtgctacgtggcacttggcccacgatctttgcctcagggggcccctacatccccatccattactaacgctttatgtctgagaatggactcacgcctcagcggcctcgcccgtaaatttgggtttaggtatagccgttacgctgatgaccttgctttctcttggcacggagagggggaagggcctgtaggagaattgttaggagcagtccatagaatcgttcgcggcgaaggctttgtcgtgcatccaaagaagactcggatactgaggtgcggcagacgccagaaggtgactggtctggtcgtgaatggccaagggccccctagagtacctcgagccctggttcgcaaactgagggctgcaatccaccaccgggagcacggtaaacaagggaagggagagacactcgctcaactacggggctgggccgcatacgttcacatgtgtgacccccagaaaggccgcgcattcctggagcgactggcgaaattaggtgaggcctga

SEQ ID NO: 13689 - RNA, 1350 nt, synthetic construct
  source 1..1350: mol_type = other RNA
atgtccgacccctctcagcagacagcaaccggcaccgctacgggtacagacccagtgccgcctgaatggccccagattgccgaggcagggggaattcacaactgggtccaggccgacctacgaagaagaggactgattgaggaggtagacaccgcatctctgagtgataagcagcggaaagctttccgggctaggagagacgaggaacgtagagtgcggaagctgctgtatgctcaagcctgggcggcttacaagcgcgcccatcttgtgcatgtgggcgtgggcgtattctaccacgatgtggccgattacgataggttcgacatcgccgaacccgagcagcgaagacaggaaaacgaccttcccgccttggctgataccaccgccctggcagaagctttggagctgccaatcccacgcctgcggtggttagtttatcatcgggaagtggataggcacactcattatcaccgttggacagtccctaagcggtccgggggtgagaggctcatctcagctcctaaaccagaacttaagcgagctcagagatggatcgcccgaaacatcaccgagcacctgcctgttcatggtgctgcccacgggtttttgcccggcaggtctactgcaactaatgccgcagtgcacgcaggcgcacgcgtaattataaaattcgacatccgcgacttttatccctcggtgaccttgccgcgggttaagggggtattcagaaaagcaggatacggcgaacaggtcgccacagttatggcgctcctctgtaccgaacctccaagggaggagatggttctgagggataagaagtactacgtcgcggtcggaccgcgttccttacctcaaggcgcccctactagccccagcataacaaatgccctggccctaggccttgacagtcgcttggccggcctcgctagaagcctggcatgcagatatacaaggtatgctgacgacttaacgttttcctggcacggagatagtgaggccccaattcaacgactgaagaatgccgtcgcgagaatcgtgcatggagaggggtttagggtgcacgaggggaaaactaggatcatgcgggcgggtggccggcaaaaagtcactgggctggtggttaacgctgcagctggggaaggcgcaatgccaccagccagggtgcctagggatgtcgtgcgacgggtgcgtgctgcgattcataaccgcgagcggggcaaacccggaggtgaagaaacactcgagcagcttcgcggatgggccgcctacatatacatgaccaatcccgagagagggcgccagtttctcgagcgcctggacgcactcgccgatgatggaagctcatcatga

SEQ ID NO: 13690 - RNA, 1428 nt, synthetic construct
  source 1..1428: mol_type = other RNA
atgaccgcctctgacacaaatcagaacccccagacagcgaaaccgcagagcgctaagccacagtccgaaagccctcaagcccactccacatctgaacgcgtcgagtggacagtgatcgcagaggccggcggaatccacacctgggtctatagcgagctagagcgccagggcctgattgacaatgtcgacacttctaccctgacagccgctgagaggaagagatatcgcaaaaagcgcgatgaggagcgtgtggtgcgaaaaatcctgcagaagaaggcctggaagtcttaccgcgaagctcacatcgtccatgtcggccgcggtgtgttctaccacgatacccccgacgtggacgtctacgatgtcgaagatcccaaggggcgtttggaatccaatgaccttccaccgattgcagatgcgctgggcttggctaagcggctcggaatcggcattcctaaacttcggtggctcgttttcaatagggaagtggatactgggtgtcattaccactactggaccgtgcctaaacgggatggtggcagacgattgattagtgcaccaaaacctgaactaaagaaagcgcaagcctggattgctaggactatttctgagcacctcccaatccatggcgccgctcacggctttgttcctggacggagcaccgtgactaacgcagcggtgcatgctggcgctagcgtagttttcaagttcgacataaaggacttttttccctccgtgactacgaaccgagtgaaggggcttcttcgtaaagccggttacggcgagcaggtagctaccttaatggcactcctgtgcaccgagtttcccagagaagagctgatgttgagaggtagaaaacactatgtagcgatcggtgcaagaggactgcctcagggagccccaacttctccaagtctgaccaacgctctgtgtatgcgtttagactgcagactcacaggactggccaatagcatcgggctgaagtactcccgatacgccgacgatctgacattttcctggcatggagaaggaaaggaagcacccgttatgaggctaaggcatgcagtgcggaaaatagtgtccgctgagggcttcgtcatcaaggattcaaagacaaggatattgaggagtggccggcggcaaagagttaccgggctggtggtaaacaaggccgagtcagccgaggatgcaagggtgcccaggttcatgctccggcaaattcgaacggccatttataaactggaacgggggcaggaggccaaggaatcattagagcagctccgcggatgggcagcttatgtttatatgactgacaaaaaacgcggggccgacatgctttcaagactggccgccataagcagtgcaaccacagccactacgacatcatcggctagcaacagttcgacgactaccggggccaaaatctga

SEQ ID NO: 13691 - RNA, 1329 nt, synthetic construct
  source 1..1329: mol_type = other RNA
atgtctgaagacacgcttgagagtgaggaggctcctgctgcagtagacccagccgcacctcctactgctaggtggccagatattgccgctgctggaggtatccagccatgggtgttggcggaactgcgaagaagggatcttgtggatgaaggtgttgacacatctcggctcagtgccaaagagaaaaagcgttttaaggcaaggagagaggaagagcgacgggtccgccgactgctgaaaaaacatgcctgggccgaatatcgccgggcacacttggtccatgttggcgtcggcgtgttccaccatgacaccgccgatgtggacaaatacgacttgcccgaccccgacgcacgtagagctgagaatgatctacctccgctcaaagatcagcacgccctcgcagaggcacttgcgattgacattcctactctgcggtggctgtgctaccaccgggaagtcgatacgggcactcactaccggcggtggactatccctaaacgaagcggaggagaacgcttaatctccgctcccaagcctaccctcatgagatgtcagagatggatcgcccagcatgttacagaaaggctgccaatccatggagctgctcatggtttcgtccccgggcgtggcacactgactaacgctgccgcacacgccggtgcaaagacagtggttaagctcgatctgaaggacttttatccaacattgacgcttccgagagtaaagggccttttccgcaaggccggctacggcgaacagacagcgacactgctggccctgctttgtaccgaggccccaagggaggagatggtgattcgcggagagcgacgctatgtggccataggagacaggagcctgccccaaggggctccaactagcccctccatcactaacgcgatatgcctgaggctagacgcgaggctcaccgggttggccaagaagctcggcttcacctacaccaggtacgctgatgacttagctttttcctcagatcggcggaaggctgccgtgggaaagctggtcgatgccgtctatagaattaccgccgacgaagggtttagggttcaccccaagaagacccgggtgatgagagaggggcgcaggcaacagatcaccgggctggtggtgaatggccaaggtgaggggccgcctgcaagagtaccccgtaaattggtgcggcagctacgcgcagccatacaccaccgtgagaacggcagaccaggaaaaggcgaatcactcgagcagctgcgagggtgggcggcatatgtgtacatgtgcgatcccgataaaggtagagccttcttagaccgcctcgccaaactgcagtga

SEQ ID NO: 13692 - RNA, 1338 nt, synthetic construct
  source 1..1338: mol_type = other RNA
atgaccgatgcttcaccggaacgcgcattgcccccttgggcagaaatcgctgaggctgggggcatcgacgcatgggttgtggccgagcttaaggctcgcgggctatgggaggagggtgtggatacgagctccttaggcgacagagaaaggaagaaattcaaggctcgccgcgaagaagagagacgagtgcgtaaacagctccggagacatgcctggagtgagtttaggcggaatcacctggtgcacgttggggcaggcgtgttctatcacgacaccgccgatgttgaccggtatgatataggggaccctgaaactcggagacaggacaatgcgctgccaaagctggctcatgctggcgatcttgccaaggagattggcctcactgtgcccaggctgaggtggctcgtgttccacagagaagtggatacgggaacccactatcatcgctggcacgtgccaaaacgggatggttccctgagattgattagtgcccccaagcctcaactcaaggcggcccagcggtggatagcgcgtaatatcaccgagcacttgccggtacatggagccgcccacggctttgtacctggcaggtctacggtcactaacgctgcagttcacgcaggcgccgaggtggtcatcaaattggatctgcaagggttttacccaaccatcaccatgccgcgtgtgaaaggacttatgcgcaaggctgggtacggcgagcaggtagctactattcttgccctgctgtgtacagagtcacctcgggagatcattgagctgaacggtaaagcccatcatgtcgccataggtccccggtcccttccacaaggagcgccaacatctccctctatcactaacgccctctgcttaaggctggacaggcggatgcagggtctagccacaaagctcgggttcagatactcgaggtatgctgacgatctgaccttttcatggcatcaagctgacgctgacgcccccgtcggaaaactgctgcaccgagttcgcagcattgtcggtgcggagggctttgcagttcaccccgcgaagacacgggtaatgcgctccgggcgtagacagaaagtgactggattggtcgtgaacggagtcagcgcagccgaaggagcccctgaagtacctcccgcccgagtgccacgcaaactgaggaggatgctgagagccgccctccacaatagaacacaggggaaggacggccctgaaagcctcgaccgactgcatggattcgctgcatacgtgtacatgacagatccaaggcagggacaggcactactggagcgagccgctgcattacgagaaggcgccgcaggcgggaccacatga

SEQ ID NO: 13693 - RNA, 1017 nt, synthetic construct
  source 1..1017: mol_type = other RNA
atgacagatccagcggctacacgcccgcttcctccttggagcgaaattgcagaagccgggggcgtagacgcttggattgtggctgaactgcgggcaagggggctatgggaagagggggtggacacttctactctgagtgaccgggacaggaaaaagtataaggcacgacgggaagaggagagacgcgttcggagagaattacgcagacacgcgtgggccgagtttcgtaggaacaacttagtccatataggagcaggcatcttctatcacgacacggccgacgttgatcgctttgatattaaagatcctgatgcacgtcggcaggacaacgctctgcccaaactccccgacaccgcagcacttgccaaagcccttgggctggggatgcctagactgcgctggctggtctttcatagacaagtggatcgcggcacacattaccacaggtggcacgtgccgaagagggatggaggattgaggctcatatcagctccaaaaccagatctcaaggccgcccagcgatggattgccagaaatattaccgagcacctgcccgttcatggtgcggctcatggatttgtaccggggcggtcaactgtcacaaatgcccaggttcatgcaggcgctcgagtcgtgatcaagctggacttgcagaatttctacccaaccatcacccagcccagagtgaagggcctgttgcgtaaagccggatatggcgagcaggtggctacggtgctgtccatgctctgcaccgagagccctcgagaggtgatcgagttgagaggtactccacaccacgtagccatcggccccaggagtctccctcaaggtgctcccaccagcccctcgatcactaacgccctgtgtcttcgcctcgatcgaaggatgcagggtctagcgggcacactgggattccggtactcccggtacgccgacgacctgaccttctcttggcacgccgatggagaagctccagtcgggaagctcttacacagggtgagatccatcgtgggctga

SEQ ID NO: 13694 - RNA, 1458 nt, synthetic construct
  source 1..1458: mol_type = other RNA
atgactgcaaaactagaatcatttgttcctgccgcccccccccaagctgtaccagaagtacctcccgctgctgctgctagcaataccgcaatcgcatctaagagagaggccaggcgcgccgcacacgatgtgttgctggctagatggaaggccataaccgaggccggcggaaccgaagaatgggtccaggcccagctgctcagcaaaggagccctcgcagatgaagttgacttcagtagtctgaaggagaaagaaaagaatgcctggaaagagaaaaaaaaggccgaggcagtagagcgccgagccttaggacgccaggcccatgaggcgtggaaggctacgcacatcaaccatcttggcgtaggcattcactggagtgaagcgcctggtcccgaccgatttgacttggaacaccgggaagaaagagcccgtgtgaatggccttccagccctggacaccgccgaagcacttgcaaaagcattggatatctctgttagcaaactgcggggattcgccttccacagagatgtggacaccggatccaactatgtctcatggcggatcccgaaaagagacggtagcgagaggactataacctctccaaaaccagagcttaaggaagcccaacggtgggtgctctcgaacgtggtggagcggctacctgtgcatggcgctgcgcatggcttcgttgcaggcagatccattctgacaaacgccctggctcaccagggtgcagatgtggtggtcaaggtggacttgaaggacttctttcccacagtgacgtggcgtcgcgtgaaggggctgctcagaaaaggagggctgccggagggaacttccacactactggcactgatgtccacggaagcccctcgcgagctccttagtttccgggggaaaaccctgcacgtggcaaagggacccagggctttaccgcaaggggcacctacatcacccggcattactaatgctctctgcctgcgcatggacaagaggttgagcgccttatcacggaagctgggctttacatacacacggtatgcggatgatctcactttcagctggaccaaagccaaggccccaagggctaggagagctcagggtgctcccgtggctgtgctgctagcgagggttaaggatgtcgtcgaggccgaagggtttactgttcaccccaataagacccgagtggcaaggaaggggtctaggcagcgtgtcaccggccttgtggtcaacgaggcgaaggatggtacacctgccgcccgagtacctcgagatgtcgtcaggcgcctccgcgctgctatccataacagacagaaaggcaagccaggcagagagggggagtccctggagcagcttaaggggatggccgcctttctgtacatgactgacccagttaaaggtcgggcgtacctcgaccaattggcaaagctggaggccaccgagacaccagctcaggcttga

SEQ ID NO: 13695 - RNA, 1461 nt, synthetic construct
  source 1..1461: mol_type = other RNA
atgaccgcacggctagagtcctttgttccagccgctgcaccacaggcagttgctaccccagcacctcaggcacccagtgccaatacagtggcccaacgcgaggctagacgggctgctcacgaggctctgcttgccagatggaaagctattgtcgaggctggaggcgccgatgaatgggcccaagcccaactcgtctctagggggcttgccgtgggcgagctcgacttctctagcgcctctgagaaggagaaaaccgcatggaaggaaaagaaaaaggccgaagcagcagaacggcgcgctcttggtaggcaggcgcacgaagcctggaaagcgacgcacgttggccatctgggcgcaggagtccattgggaagaagagggaggatcagacaagttcgatatagctcatagggaagagcgagcccgggccaacggattgcctgagctgggttctgcggaagtgctggcaaaggccttgggtctatccgtgtctaaactccgatggtttgcttttcacagggaggtggacactggaagccattatatctcatggggcattccaaagagagacggggggacacgcactatcacttctccgaagcccgaactgaaggaagcgcagcgctgggtcctcagtaacgtcgtggaaagactccctgtacacggcgctgcacatggcttcgtggctggcaggtccattctcaccaatgcgctggcccaccatagcgccgatgtcgtagtcaaggtggacctgaaagacttctttccctcagtgacttggaggcgggtcaaagggttgttgagaaagggggggttacccgaaaacactagtacactgctcgccttgatgagcactgaggcaccccgggaggctgttcagttccgtgggaagaccctttatgtcgccaaaggaccgagaagccttccacagggcgctccaacaagcccaggcatcaccaatgccctgtgcctgaagctggataagcgcctgtcggccctttcaaaaaaactggggtttgtatacacgcgttacgccgacgacctgaccttttcctggacaaagacaaaacagcccaaagcacggagggcacaaggtgcccctgttgccgtgctgttagctcgcgtgaaagacgtcgtggaaagtgagggtttccgtgtacaccctgagaaaacacgagtgagccgaaaagggacccgacagcaggtaaccggactagtggtgaacagggccagagatggcgtggctagtgctagggtgccccgggatgttgttcgcagactccgggccgccatccacaatcgtcagaagggcaagcccggcagagagggtgagtccttggagcagttaaagggaatggcagcgttcgtgtacatgacggatgagactaaggggcgcgcgttcctgaaatccctggagcagctcgaagccagggaaaaggaggctgcacctaaggccccttga

SEQ ID NO: 13696 - RNA, 1455 nt, synthetic construct
  source 1..1455: mol_type = other RNA
atgaccgctcggctggatccattcgtgcccgcagctagtccccaagccgtaccaactcctgaaccaactccgcctgctcccgatgctgctgcaaagcgcgaggcaaggaggctggcacatgaagccctgctcgccagagccaaagccattgacgaggcaggaggcgccgatgactgggtgcaagctcagctggtggccaaaggcctatccgtcgacgaccttgacttctctagtgcgagcgaaaaagataaaaaggcctggaaggagaagaaaaaagctgaggcggtcgagaggcgggccctcaaacgacaggcgcacgaagcctggaaggcaactcacgtggggcatctgggtgcaggggtacactggaccgaagacagacccgcagatgctttcgacgttcctaaccgtgaggagcgagcccgcgcaaatggcctcactgaactcgattctacggaggcccttgctaaggcgctgaagctgagtgtgccaaaactgaggtggttcgcctttcatcgcgaagtggacacagctactcactatgttagttggaccatacccaaacgggacggctcaaagcggactatcaccagccctaagccagagcttaaagaggcacagagatgggtgctgagcaatatcgtcgagcgattgcccgtgcacagcgcagcccatgggttcgtcgcagggagatccattttaacgaacgccctcgcccatcagggggctgatgtggtggtcaaggtggatctaaaggatttctttcccagcgtgacttggcgtagggttaaaggtctgctccggaaaggagggctggcagaaggctccgctaccttgctgtccctgatgtcgacagaggccccaagggaggccgttcaatttcgcggaaagctcctttacgtcgccaagggccccagaagcttaccgcagggagcaccaacctcacctggcatcaccaatgccctgtgcttgaagctggataaacgcttatctgccctggcgaagagaatgggatttacctacacgaggtatgctgacgatctcacattttcttggaccaaggccaaacaacctaaggctcggcgaacacagcgcccacctgtagccatgttgctgtcaagggtgcaggaagttgtggaagccgaggggttccgagtacacccggacaagacacgggtggctcgtaagggtacacgccagcgggtcaccggattggttgtcaacaccgctggaaaaaatgccccagccgctagagtcccgagagacgtggtgcgccagttgcgtgcggctatccacaacaggaaaaagggtaagcctggcagagaggatgaatccctagaacagcttaagggcatggccgcctttattcacatgacagaccccgctaaaggccgggctttcctggcccagcttgcagagctcgagtcagcagcacccgcgacacctgcgcagtga

SEQ ID NO: 13697 - RNA, 1458 nt, synthetic construct
  source 1..1458: mol_type = other RNA
atgacggcacggttagaaagctttgtccccgcagcctctccccagaccgtcagtactcccgcgccagctgcaccagcagctaatgcagcctctcagagagaagcacgccgcgctgcccatgaggccttgcttacacgttggaaggctattgtagagtctggcggcgcggacagttgggttcagggacaactcgtttcccgcggtctggctgtaggggacttggacttcgcgagggcttctgacaaagaaaaaacagcctggaaggagaaaaagaaggctgaggcagccgaacgacgggcattagagaggcaggcccacgaagcatggaaggccacacatgtggcgcacctaggagccggtgtgcattgggaggaggacgctgctggggataagtttgacatcgcagccagagaggagagagcccgggcgaatggccttccggagcttgatagcacagatgccctggccaaagctcttggtctttccgtttccaagctccgttggttcgcgttccaccgcgaggtagacactggcagccactatgtcagctggaaaatcccaaaaagggatggcggcagtcgaaccatcacgtcgcctaaacctgaactgaaggaagctcaacggtgggtcctggccaacgtggttgagaaactgccggtacacggagctgcacacggattcgtggccggcagatcaatcctgactaatgccctggctcaccagggagctgacgtcgtggtgaaagtcgacctcaaagatttttttcccagcgtcacatggcgcagggttaagggtctactgcgaaaaggtggattacccgagtctgcctcaactctgctggcactcatggccaccgaagcacctcgagaggctgtccagttccgtggcaagcttctgtatgtggcaaagggaccaagaagcctcccccagggagcacctacttccccaggcattacgaacgcactctgcttgaggctggacaagcgtctgtctgccctgtccaagcggctggggttcacctacaccagatacgccgatgatctcactttctcgtggaccaaggctaagcagcctaaagctaagcgatcccaacggccgcccgttgcggtgttgctaagtcgggtgcagtcagtggtcgaagcagaagggtttagggtgcatcctgataagacacgcgttgcccggaagggcaccagacagagggtgaccgggttggtggtgaacgaggccgccaatgggaaaccagctgccagggtgcctcgcgatgtggtacgcaggctcagagcggccatacataaccgggaacaggggaaacccggcagagagggcgagagcctggatcaactcaagggaatggccgcctttattcacatgacagacccagtgaaggggagggccttcctggaacagttagccaaactggaggccaaggaacagcaatcacctcccgctgcttga

SEQ ID NO: 13698 - RNA, 1461 nt, synthetic construct
  source 1..1461: mol_type = other RNA
atgactgggcggttggagagctttgttccagccgccgcccctcagacagtgcctactcctgcccctcaagctgcgacagccacggctctggtgcaaagggaggcccgtcgagtggcatatgaagccctggtaacccgttggaaggctatagtcgaagcaggcggcgctgatgcttgggtacaggctcagcttgtctctcggggactggctgtgggggatctggagtcaggggttacagagaaagaaaagacagcatggaaagagaagaagaaagcagaggccacggagcgcagggcattgctacgccagacgcacgaagcctggaaagcaacacacgtcggacatcttggtcctaacatccattgggaggaaaaggacgggggctcagacaaattcgacatcccccatagagaggagcgagctcgcgccaatggtatgccggaactcggctcggcagaagcgctagcgaaggccttggggctgagtatatccaaactgagagggttcgcctttcaccgcgaggtcgataccggaagcaactacgtgagctgggggatcccaaagagagatggcggaacacgaacaatcacttcaccaaagccagagctgaaagaggcacagaggtgggtgctcgccaatgtggtcgaacggttgccagtacacggcgccgctcatggctttgtggcgggtagatccattctcacgaatgccctagctcaccagggcgctgatgtcgtggtgaaggtggacgttaaagacttcttcccctccgtaacatggaggagggtgaaaggcctcttacggaaaggcggtctgccagagaacgcctctactctgctcgccctgatgtctaccgaggcccctcgcgaaaccgtgcagttcagggggaagacactccacgtcgcaaagggacccagagcgctgcctcaaggagcaccaaccagcccgggcattaccaatgccttgtgcctgaaacttgacaagcggctcagcgccctcagtaaacggctggggttcacctacacccggtatgcagacgatcttaccttctcctggactaaggctaagcagcccaaggcaagacgcgctcagggagctcccgttgctgtcttactgacccgggtgaaggacgttgttgaggcagagggctttcgactccaccccgaaaagacccgtgtgagtagaaaaggtactcgacagcaggttaccggtcttgtggtcaatcaagccaggaacggagtgcccgctgccagggtacctagagacgtagtccgccgtctgagggctgccattcataacagagaacaaggaaagcccggccgcgagggggaatccttggaacagttaaagggcatggccgcatttgtgtttatgacagatgctgccaaaggaagggcgttcctggattctctggcgagacttgaagcacgggagactcccgaggccccgaaagtgacttga

SEQ ID NO: 13699 - RNA, 1452 nt, synthetic construct
  source 1..1452: mol_type = other RNA
atgactgccaaactggaatcttttgttccggccgctcccccccaagcaattgctacgccaacacccgtcacccctacagcacaggcactggtgcagagagagactagacaagcagcccgagccgcggtactagcaaggtggaaggcaatcacagaggcgggaggacaggacgagtgggtgcaccagcagcttgtggctcgtggcgcactggctgaagaggtcgatttcagctcactcaaagagaaggaaaagacggcttggaaagagaaaaagaaggcagaagcgactgaacgccgtgctctgaagcgcctcgcttacgaggcttggaaggccactcatataggtcatcttggcgctggaatccactggaatgaagaaggcggggccgacgcctttgacatcccacaccgggaggagagggcaaagtccaatggcctgcccgagtttaccagtgccgaagacgtggccaaagctctgggtttgggggtgtctaagctgcgctggtttgccttccacagggaggtggatacagccactcactacaccagctggagaatccccaaaagggacggcgggagtaggaccattacgagcccaaaaacagaacttaaagccgcccagcggtgggtgctgagcaatatagttgaacggctgcccgtgcatggtgccgcacatggattcgtcgcgggcaggtccatcctgaccaacgctttagcacaccggggggccgatgtggttgtgaaagtggatgtcaaggatttcttcccatcggtgacctggcccagggtgaaaggactcctgcggaagggcggactgcctgagaacattgcaacgctgctcgccctactcgctacagaggcacctcgggaagccgtgtcctttcggggcaagacactgtatgtggcacaaggtccacgagcactccctcaaggggccccaaccagtccgggaattactaacgctttgtgcctccgcctggacaagagactgagcgctttgtcaaggaagcttggcttcgtctatactcgctacgccgatgacctaacattctcttggaccaaggctaaagccccgaaagctaggagggcgcagggagctcctgtagccgtgttattggcccgcgtgcaggaagtagtcgaggcggagggctttcgtctgcatcctgataagactagagttgcccgtaagggatcacgacagagagtcaccgggttggtcgttaacgacgccggtcctaaggtacctgccgctcgagttccacgcgacgttgtcagacgactcagagccgcccttcacaatagagaacagggcaaaccagggaaagagggggagtcccttgagcagctccagggcatggccgcttttatccacatgaccgatcccgctaaggggcgggcgttcatggaacggttagagaaattgtctgcacgccccgcaacaaccgccgcgtaa

SEQ ID NO: 13700 - RNA, 1425 nt, synthetic construct
  source 1..1425: mol_type = other RNA
atgactgctaagctggagacttttgttcctgcggcagcacctgtggtagtaccagctccagctcctgccgctcccagtgcaaatgtcgtggctcgccgggaagtcagccagagggaggaacaggcaagattagcacgctggaaagctatagaggaggcagggggacaggaggcatgggttgaggccgagctgaaggcgagaggactggctcccgaacatgaagatccctccggcctgtcggaaaaagagaagacagcctggaaggaaaaaaagaaggccgaagccgccgagcgaagagccctcaaacgccttgcctgggaggcttggcgtacagcccatatcaaccacttaggagcgggagttcactgggaggaagctgggggcccagacacttttgatctgaaggatcgtgaagaacgagccagggcaaatgggctgcctgagctcgaaagcgcccagaccctcgccaaggcactaggtctttccgtctctagactgcgatggtttgcctatcatagagaggtggataccgggacccactacagaagctgggaaatccctaagcgggatggtggcaaacgaacaattacctcccctaaaaaagagctgaaggaggcccagcgctgggttctggcgaacgtggttgaacgcctgccagtccacggagctgctcatgggtttgttgccggtcggagcatcgtcacaaacgccatggcgcacaagggagcagacgtggtggtgaagatggacattaaggattttttcccgtcagtcacctggcagcgggtcaagggactcctgcggaaaggcggtcttgccgaaggtaccgctaccctcctagccctgatggctacagaagcaccccgggaagttgtacagttcaggggcaaaactctgtacgtagctaaaggcccaagagctctcccccaaggagcgcctacttctcccggcatcacgaacgccttgtgcttgcggttggataaaaggctgtctgccttgtccagacgccttggattcgcctacacgaggtatgcagacgacatgaccttctcatggaaaaaaagtagggggaagacagaagctccggtggctgtcctgatagctcgcgtggagaaggtcttggaggcagaggggtttagagtgcacccagacaaaacccgtgtgatgcgtccgggcaatcggcaagtggtgacgggcctggtggtgaatgaggcggccaaaggtcaaccaggcgcacgagtgccaagggaggtagtgcgccagcttagggcagcactccataacagagaaaaaggcaagcccgggaaggagggcgagactctggaccagcttaagggcatggccgctttcattcacatgacagaccccgccaaggggagggccttcttagagaggctatcagccctcgagaagcgggaggcctga

SEQ ID NO: 13701 - RNA, 1446 nt, synthetic construct
  source 1..1446: mol_type = other RNA
atgacgtccaagctcgagagctacgttcctgccgctccacctcaaccggctacagctcctgcacccggctcaccatctcccgcaacacttgcccagcgtgaggcacggagacagcagcatgaggcacttctgactaggtggaaagctattcaggaggctggtggcgctgacgaatgggtgagagctcaactagtcgccaagggcgccgccgctgaagaagtcgactttgaggagttatcagagaagcagaaaagtgcctggaaggagaagaaaaaggcagaggccgtggagagacgagcgctggaaaggcaggcgtgggaagcttggaaggcaactcacattaaccatttgggcaccggggtccattgggacgaacagggaggccccgacaagttcgatgtgccaaaccgcgaagagcgcgccaaagctaatggtatgcccgagttggattctcctgaggcacttgccaaagccctgggcgtgactgtgtccagactgagatggttcgcatttcaccgcgaggtcgataccggaactcattaccaaagctggcgcatccctaagcgagatggcgggcagcgcactataaccgccccaaaaaaggagctgaaagccgctcagcggtgggttctcgccaacgtggtcgaacgactaccggtccacggtgctgcgcatgggtttgtggctggccggtccatcttgaccaatgcacttgcccaccgcggcgcagaagtgctggtgaaggtggacgtgaaggacttcttcccttccgtaacgtggcagagggtcaagggactgctgcgtaaaggaggccttcccgaaggcgccgctacgttgctgagcatgttgtctaccgaagcccccagggaggttatggagttccgggggaaaacactctacgtagccaaaggccctagggctctgccacaaggtgccccaaccagccccgcactgactaatgctctctgccttaaactggataaacgagtatctgccatggcgaaacggttggggtttacatatacaaggtatgccgacgacctgaccttctcgtggcgaagggctaagggagcgaaggggaaggcacaagccgatgcacctgtggcagtgctgttagcccgcgtaaagagtattctggaggcggagggattcacaatgcacccagaaaagacccgggtcctcaggaaagggacccagcagagagttaccggactagtcgtgaatgaggcaccagatggggtgcccgctgcacgtgttcctagggacgttgtgcggagactcagagctgccatccacaacagagaaaaggggaaaccaggtaaagaaggagaaactctcgagcagctgaagggaatggccgcctttatccacatgacagatcccgcgaaaggtcgggcctttctccagcgcttagaggccctggaaaagctcgagccgcccaagtga

SEQ ID NO: 13702 - RNA, 1428 nt, synthetic construct
  source 1..1428: mol_type = other RNA
atgactgctaagttggagccacacgtgcctgctgcaccaccagtcccaggggaagcaccagcacctacgaggcctgaccctgccaaacaggaggcccgaagagcacaccacgaggctctgcgacttaggtggaaggctatcgaggaggcgggaggcacagatgcctgggttcgtcagcaactggtggcaaagggcgtcgcggccgatgaggtggactttgaatctcttacagataaacagaaagcggcctggaaggagaaaaagaaagcagaagccacggagagacgcgcacagaagaggctggcttgggaggcctggaaagcaacacatatccaccacttgggagttggagtacactgggatgaagccgggggaccagacacttttgacgtggaaaaccgggaagagcgggctaaggcaaatgggcttcccgaaacactagacagcgccgaggctctggccaaggccttaggcatatccctgtctcgccttcgatggttctcgtttcatcgggaagtggacaccgggactcattaccagacttgggaaattccgaagcgggatggcggcaagagaaccttgacatctcccaaacgagaactgaaagccgtacagcgctgggtgctcgccaatgtcgtggagagactgcccgtacacggtgcggcacatgggttcgtagccggacgctcaatcctcaccaacgccctcgcacataggggcgctgacgtggtcgtgaaagtggatatgaaggacttcttccccagcgtgacctggcgcagagtgaagggactgctcaggaaaggtggactgaccgagaacctggcgactttactgtccctcctggcgaccgaagccccacgtgaagtggttagatttaggggccagactttgtatgtcgctcaggggccgcgggctttacctcaaggagctcccaccagtcccgcccttacaaacgccctgtgccttcgcctagacaagagagtcagcgccctgtcaaaacggttgggtttcacctatacaaggtacgccgatgatctgactttctcctggcgtagaacaaaagctcctggccaagctgatgcccccgttgccctgctcctggctagggttaagggcgtcctcgaggctgagggttttaccctgcaccccgataagaccagggtgcaacgcaaggggagtcgacagcgggttaccgggctcgtcgtgaatgaagcaccagaaggggctcccggtgccagagttccgagagacgtggtccgcaagttgcgcgcagcgattcacaatcgtgagcagggaaaacctggtcctgaaggcgagacgctagagcagctcaaaggcctggctgcctttgtgcatatgactgacgcagagaagggccgggcattcctgaggcggttagaggccctcgagcaacggcaggcccgatga

SEQ ID NO: 13703 - RNA, 1404 nt, synthetic construct
  source 1..1404: mol_type = other RNA
atgaccaatcggatcgacgatcatgtgtttgctgcaccccctgttctgaccacgagggctccaccgcgggtcaaacttacagccgccgaacgtgccgagagagagaggcaaaggactgcggccgaagccagatggctcgagattgaggccaaggggggcgttgacggttgggtacgcgcaaagttgatcgaggcgggacaccatcccgatgtggctggaccggcatctgaggacgaaaagaagactttcaaagagaaaaagacagctgagcgggccgaacgaaaagccctgagggctctcgcaaacgaagcaagacgattcggaaccgtcggctttctcgggaataccgtgcattgggatgacctgaagggccccgacgatttcgatctgaaggacagagcggcccgagctgaacgaaacgggctgcctccatgggagacggctacggaactggccgctgcaatggatctctccttgagtgagctgcggtggctaaccttccacagagaggtgtccacatcaacccactaccatagctggaaggtccctaaacgttccggcggtgaacgtactatcactgccccactgccaaagcttaaagcgctacagaggtgggcacttgaacactacttcgaaaagctgcccgtgcatgcggctgcccatggctttctgccagctcgcagcgtcttaacaaatgcccttgcccacgtaggtgccgacgtcgtcgtgaaattagatgtgaaagacttctttcctactgtgtcgtggaagcgcgttaagggcctattaaggaaagctggagctacggagcaggtcgcaacactgctggctctcctgtgcaccgaagccccgaggcagctcatcgagtttcgcgagcagacacttcacgtggccacaggtccaagagttttaccccaaggcgccccaaccagccctgcgataaccaatgcgctttgtctacgactggatcagcggctttctgcactggccagggccttgggctgcacctatacacgctatgcagacgacctcactttctctttcaaaaagactcccgagcggaagagactggccctggggattttggtggagacaaccaaggatatactgaaaagcgaaggctttgctctgcacgctaagaagacccaggttctcagacggggagcagcccagagggtaacagggctgactgttaacgaagcaggaccccaagtggcaaaggctagggtggcacgcgatgtggtacgcagactccgggctgccattcacaaccgtgctaaaggaaagccttaccgcgagggcgagagtcacgcccatctccaggggttggccgcatgggtgtttatgtcagaccccaaacggggggcccaactgttggagcaggtggctaaattgcctcagtga

SEQ ID NO: 13704 - RNA, 1437 nt, synthetic construct
  source 1..1437: mol_type = other RNA
atgaccgccagaatagatacttatgtcaaagccagtccagttagtgcagcgcagcccagacaggggcagctaagcgcagccgaaagggcacagagggagcaagaacgtgcagatcggcaggctcgctggttggccattagagaggccggcggcatcgacaagtggatagaccagcagctggcaagtcggggactggcgtctgatggcggtgacgaatcagccttgatcgagagggacaaagctgggtataaggccaaaaagaaagccgaggcggaggctcgtagggcattaaggcagaaagcgtggcaggcgtatcacgcgactcacattaatcatcttggagccggcattcactgggaggacgatccagatgtggacaggttcgacgtcgaaaaccgcagcgagagagcacgggataacgggcttcccgagatctcaacaccagagcagttagcgaaggctatgggcctctccatacccaagcttcggcagctgacataccaccgggaaaccgatacagggtcaaattattacagctttactatcccgaagagggatggctcccctagatccatctttgccccgaagcgagatctcaaggctgctcaaaggtggatgttacggcaagtggctgagcggcttcctgttcactccgctgcccatgggttcttacccgacagaagcatcctcacaaacgctctgcagcatgtgggagctcacaccctcgtgaaggtagacattagagatttctttcctactgtgacttggcgccgagttcgggggctgctgagaaaaggagggctgtccgaacaggcagccaccctcctgtctctactggccacggaggccccgagagaagtcgtacagttccggggaaagaccctgcatgtcgccaccggacctcgtgctctacctcaaggagcccccacctctcctgcactgacgaatgccctatgcatgagacttgacaggcggatgtctggcttggcacggctgctcggttgtcgctacacccgctacgccgacgacctgacgttctcgttttgccacgccgacggtcataccggtacaggccgagctccagtgggggcattgctgcgaggagtgggacaaatcttgacagcagaaggctttaaactgcaccctgacaaaactcgcgtcgtacgcgttggcgaacgccagcgtgtgactggactggtcattaatcaggtgccaaagggcgttacagctcccggtgctagggtgcccagggatgtgctccgaagactccgcgccgcactgcataaccgcgagcaaggcaagccaggtaaacctggggaaaccctcgatcagttgagcgggatggctgccttcgtccacatgaccgatccagccaggggccgagtgctccttgacagactggccgcactgaaagctaagcagcccgaggccacatga

SEQ ID NO: 13705 - RNA, 1440 nt, synthetic construct
  source 1..1440: mol_type = other RNA
atgaccgcaaagatcgaccccatcgtgcaagctgcccagcctgcaatcctgccggtaactaccgcgccttctgtgaaacctgccggcacacctgaagaacggcagcgagcccatgaggagagagtagctcggtggaaggctatcactgaggccggcggcatagatgcttgggtgcaggcggaattgaccagcaggggcctactcgtctcaggggaccctgctcggatgagtgagcgtgaacggagccagtggaaagagagaaaaaaggctgaagtcaaggagcgccggacactgagacggctagcctggaaggcatacctgggcacacatatcgcccacttagggcagggtgtgcattgggaggacaagaagggcgccgataaattcgatgtcccacagcgtgaggaaagggccaaagcattggggttgccccagcttgccggtgcggaagatctggcagccgggatggagttaagcgtggcccgactgaggtggctcgcattccatagagaagtggatacaggatcccactacagacgctggacgatccccaaacgggatgggtccgagagactgattactgcccccaagaaggagctcaagagggctcagcggtgggcgttgcgcaacgtattcgaaaaactcccagtgcacgggtccgctcacggatttctgtctgctagatccattgtcaccaatgcggccgtgcatgctggtgccgacgttgtgatcaagattgacatcaaggatttcttcccgaccgtaacgtggcgcagagtcaggggcctactgcgcaaagcagggcttgcagaaggccctgccaccctgcttgccctcatttctaccgaggctccccgtgaggtggttcagtttaggggaaaaaccctttacgttgcctcgggaccacgcgtgctgccacaaggagctcctaccagtccagcaattaccaacgctttatgcctgaggctcgacaggcggatggctggtctggcacgcaagttggggttgaggtatactcgctatgccgacgacctgacctttagttggaaaagcccagccacaggagaaacttcaagagaagttcccagggccagggcgcctattggaccccttctgcacggaacgcgagaaatactgggcgctgaggggttccggttgcacccaactaagactgcagttatgcgccgaggagatcagcaaaaagtcacaggcctggtggtgaatgctgccggtccgtcagtccctcccgtgagagtgccccgagagaaggtcagagagcttagagctgccatacgtaaccgagagctgggacgggagggcaaaggcgaaacactcgcccaactgaagggcctcgcagcatttgtgtttatggcggacccagttcgcgggcgggcctttttagaccgtctggcagccctcgagacaagggcaggtggctga

SEQ ID NO: 13706 - RNA, 1479 nt, synthetic construct
  source 1..1479: mol_type = other RNA
atgacagcaaagattgaccccatcgtgcaagctgccgcccctgttgttctgcccgtgactactgcccccgcggtgaaaccaactgagacggccgaggaaagacagcgcgcactggaagagagggtggctagatggaaggccattacggaggccgggggtatcgacagctgggttcaggccgaactgtcttctcgaggcctcctcgtgtccggggatcctgctaggatgtccgacagagagcgctctcaatggaaagagcggaagaaagccgaggttaaagagaggcggacattacggcggcaggcatggagtgcctacctgagcagccacatcgctcatctggggcagggcgtgcattgggaagagaagactggtgtggacaagtttgacgtggcccagagagaggagagagccagggctctcggcttgccagcaatcgcgagcgctgaagaactggccgccaagctggaaattcccgtcgctcggcttcggtggttggcctttcaccgtgaagtggacaccgggtcacactataaacgctggttcatcccaaaaagggatggaacccagagactgatcacatccccgaagcgtgatctgaagcgtgcccagcgctgggcccttaggcatgtgtttgagaagctaccggttcatggaacagcgcatgggttcctgagtgcaagatccattgtgaccaatgccgaagctcacgccggagccgacgtcgttgtcaaggttgatataaaagatttcttccccactgtgacgtggcgccgtgtacgaggtttgctaagaaaggctggcctcgctgaaggccccgctactttgttgtcattgttaagcaccgaagcccccagagacgtcgtccaatttaggggaaaaaccctgtacgtggcaaacggccccagggtattaccacagggcgcacctacctcaccagcaatcaccaatgctctatgcctgcggcttgacaggagaatgagtggactcgcccgcaagctgggtatgagatacacacggtatgccgatgatctcacctttagctggagggcacctgcagcggcggtagcttctgagacaggaaagaagggcaaaggcaaagccgatgctaaagcagctgagcctcgtcctcaagcccctgtgggggcacttctccgagcagcaagagacatactgggcggagagggatttcgcctgcacccgacaaagaccactgtgatgaggcggggggatcagcagaaggtgacaggccttgttgtcaacgccgctggatcgagtgtcccagcagtccgagtcccacgcgagagagtacgcgagctgagggctgccattcgaaaccgggagttaggccgcgaaggtaagggggaaaccctcgatcagctgaaagggcttgcggcattcgtgcacatggctgacccagtgcgaggcagggctttcctggagcggatagcggccctcgaatctcggtcctcaggttga

SEQ ID NO: 13707 - RNA, 1503 nt, synthetic construct
  source 1..1503: mol_type = other RNA
atgaccgccaagatagacgcaactgtgcaggcccgcgcaccagtggtcttacctattacaactcctcctgctcccggtggggctgctgcaagatttcacgcagccgctggggctgaagctaggagactagcgcatgaagagcgagtagcccggtggaaggctatcgacgaggctggcggcatcgatgcctgggtgtctgctgagctcacatcaaagggcgccctggccaccggagatccaaaagctatgtctgacagggagagggcccagtggaaggaacgtaaaaaagtcgaagcccgtgaacgccggagcttgcgcagacttgcctgggaagcatatgtggccactcacgttaaccacttaggcgccggagtgcattggtcggaccgggtagggcccgatagattggacgtccccggtctgagtgagcgagccagagcgcacggccttccagacttacctggggccgccgaacttgcttcagcgttgggactgtctattcctaggctgcgttggctggcctatcaccgggaggtggacaccgggacccattatcgccggtggcacatcccgaagcgggatggatcagccagaacgatcagctcccccaaaagggatctaaaaagggcacaacggtgggccctgaggaatcttttcgaaaaactcccggtccacgcagcagcccacggtttcttagcgtcccggagcattgtgactaacgcggctgcccatgccggagccgacacaatagttaaggtcgacattaaggatttcttcccaacgattacttggaggcgcgtacgcggtctgctccgcaaagctggcgtcgcagagggacctgccacccttgtggcactccttagcaccgaggcgccaagagatgtggtgcagttccgaggccagactctctacgtggccacaggccccagagtgttgcctcaaggggcccctaccagccctgcaatcacaaacgcaatttgcctgcgtctggatcgcagagcatcaggactggctcggaagctcggcctgcggtacaccagatacgcggacgatctcacattttccttccgagccaccgaggctcccggattagcaggtgcggctagacctagagcaccggttggcgctctgctcagaggcttgagggagatcctgtcctctgaggggtttcgcctgcaccccagtaaaaccgtggtgatgcggaaggggagtcgccagaaggttacaggcctggttgtgaatcatgcgtccgaaggtgctccagctgcccgagtgccaagggaaagggtacgagcactgcgtgctgcaatccggaatcgcgaactagggaggcccggcaagggtgagacgttggctcagttgaaggggctggccgcctttgtctacatgactgaccccgccaaaggacgcgcctttctgggacggatagaggccctcgagcgaaaccagccagctccagttggagaggctggcccgcatgatgcaaggcccgtcctgacatga

SEQ ID NO: 13708 - RNA, 1359 nt, synthetic construct
  source 1..1359: mol_type = other RNA
atgacggaggccgggggcatagatgcttgggtgtctgcgcagcttgctgccaaaggcctggccgtgacaggcgatccagcatctatgagcgatcgcgagagagggcagtacaaagaaaggaagaaggccgaagcgaaggaaagacgggcgctgcggaagcttgcatgggaggcttatcttgaaacccatgtgacacacctaggagcaggcgtgcactgggaggacgacgcaggtccagaccggttcgatgctcctaatagggaggagcgagcccgcctgattggcttgcctgccctggagacggccgatgctttggcaggagccctggaagtgcccgttgccaaactgcgctggctcgcgtatcacagggaggtggacaccggcagccattaccgtcggtggcagattcccaagagagatggcaccgcccggacaatcaccgcccctaagagagatctgaagcgggcacagaggtgggccctgcgtcatgtgtttgataaacttcccgtgcacggggccgcacacggctttttggcagaccgaagtattgtgactaacgcagttgcacatgctggcgcagatgtcgtggtcaaggtagacatcaaagactttttccccaccattacttggcgaagggtgcgaggcctgctcaggaaggctggtgtggccgaggctccagccacattgatcgcccgcctcagtactgagcccccgagagaagtggttcagttcagggggaagacgttacacgtcgcaaccgggccgagagtgctaccacagggagctcccacttcaccagccatcacaaatgcgatctgcctgaggctggaccggagaatgtccggcctcgccagaaagcttggattccgctacacacggtacgctgacgacctcacactctcctggagagctggtgggccaccagctgcacctccagctgctgctgctcctggacctggttctcctggaggtgcccggtcacaacgtcctcccatcggtagcttactgcgagggatcaaacagatactactgtcggagggatttcgcctgcatcccagcaagactgtggttatgcggcgcggcgatcgccagaaagtaaccggacttgtcgtaaaaggagctggcgattgggtcccacctgcccgtgttccgagggaaagagtacgcgagttgcgagccgcgattaaaaacagagagctgggaaggcccggcaagggcgaaaccctccaacagctgaaagggctcgcagcgttcgtttatatgaccgaccccgtccgcgggagggcctttttagaccggttggccgcactcgaagccctgcaagtcaagtccgggggagccggtgaacctactgggtga

SEQ ID NO: 13709 - RNA, 1455 nt, synthetic construct
  source 1..1455: mol_type = other RNA
atgacagcaaagattgacactagcgtgagggcagcccctcccgttgtccttcctatcacgacaacaccaccttctcctccgcgcgttagcgccgaagaacgggcacgagtgctggaagagagattgagcagatggaaagcgatctctgaagggggaggaatagatcagtgggtgagcgctcaactcactgccaagggcgcattggtcactggcgatcccagcaggatgagcgacaaggagcgggctcagtacaaagaaaggaaaaaggtagaggcgaaagaacgaaggtctttacgtaaactagcttgggaggcctacgctgcaacccacatctcccacctcggcgctggcatccattgggaggactcgactgacgccgacaagttcgatatagcaaatcgtgaagagcgcgcgaagaccattggccttccacctctggtcggggccgtggatctggctaaagcgctggatatacccataaccagactgaggtggatggcatttcaccgcgaggtggacaccggatcccactaccgacgatggctcatccctaaacgcgacgggtccagtcgtacaatcacagctccgaaacgggacctgaagagggctcagaggtgggcactacggaacgtgttcgatagactgcccgttcatggcgccgcgcatgggtttttgtctgcccgcagcattgtaactaatgccaaggctcacgctggtgccgatacagtggttaaggtggatatcaaagactttttcccaacagtcacttggcgtcgcgtgaggggccttctgcggaaagctgggatggccgagggtccagccaccttactcgcactactgtcaacggaggcccccagagaaatcgtgcagtttcggggaaagacactctatgtggccactggcccgagagtgctcccacaaggtgcccctaccagtcccgccattaccaatgctatttgccttcggctggaccgcagagtctccggactggctaagaagctcggcttccgctacacgcggtatgccgacgatctgacgctgtcatggcgtgcccccgttaagccggatgctggcacatccccaagagcccctatcggaactttattgcgggggctgaaggaaatcttgcagtcagagggtttcaggatgcatccaagtaaaaccgcaattatgagggctggaatgaggcagaaggtaaccgggcttgtgattaacaaggccggggagaacatcccagacgcgcgagttccccgcgacaccttaaggcggctgagagccgccattaagaaccgcgagttgggtagacccggtaaaggcgagtctctggcacagctgaaagggctggccgcttttgtctatatgacagatcccgtccggggaagatcacttctcgatcgaattgacatgctcgaggcaagaagtgaaggcggcggatcccctaccccagcaacctga

SEQ ID NO: 13710 - RNA, 1431 nt, synthetic construct
  source 1..1431: mol_type = other RNA
atggatccgtggataacggcccagctgaaggctaagggcctgcttacagaagatttgtcagatgaggaagatgaggacgaggatgagagtgatgatgacgacgacgaggacagcgatgatgaggattcaaatgacgaggacagcgacgacgaggactccgacgaggatgcacctccccggaaggcagctgctaagaaagctgtcgctaaagcagccccaaaggtgaagtctgacctcgggaagagagagtataaagaaaaaaaacaggcggaagccgtcgaacgtcgagtcctaaagaggctcgccagacaggcatataccgcagcccatatcgcacatctcggggctggcatcttttggcgcgatgacacaaggcgacccgacgccttcgaccaccctcagagggagacgagggctcaggagctgaaacttgagcttactgatgcaaagcaattagctggcgcactcggactgactatccctgccctgcggtggctctcctttcatcgggaggttgataccggcacccactaccgaagttggcaaatacccaaacgtgatggcaagtctacccgcaccattagctccccaaagaagcagctaaagaccgcacagagatggttgttaagaaacgtcttagaaaagctgcccgtgcacggtgctgcccacggattcctatccgcccggagcattgtcacaaacgcccaggtacacgccggtgcggaagtggtgattaaagtggacatcaaggatttcttcccctccattacctggaaaagggtgaaaggtctgctgcgcaaacacggactgccagaaggggtggctactctgttgtctctcctctcaactgaggccccgcgagacgtagtgcagttcaggggcaagacactgtacgttgcaaagggacctagggctctgccacaaggtgccccaactagtccggcgcttacaaatgccatctgcctgagacttgaccgccgactctctggcctggctaggagcttgggctttcgctacacacgctatgccgacgacctcaccttcagctggcatccagaacctgttttacccggtacttcgccccaaccaggaacgggggccttgctgagagggattggccagattctggaaggggaaggcttttcactcaaccaagcaaaaacccgcataatgcgggacggaactcggcaggccattacagggctgatcgtgaacggagcccctggcaaagccaccgctagagtgcctcgggagacacttcgtcagctgcgggccgcaatccacaatcgcgaagcgggtaaacccggaaggcctggcgagggactggaacagctgagaggcatggctgcctttgttcatatgaccgatgcggccagggggaaggcattgttggctcggatcgacgctcttgcggccagagataaggggtga

SEQ ID NO: 13711 - RNA, 1413 nt, synthetic construct
  source 1..1413: mol_type = other RNA
atgacggccccgttcgatccccatcttcctgccgacagtcccgtaagggcggaacccaggtctactacccgacgctcccccgaggaaactgcaaagcttgccgccgttagagctgagagagtggccctctggaaggccatcgaggaagcaggcgggatagcagcctgggtcagggctgaaattgcgaaaaaaggaatcagtacagacggggtggacccctcaacattgagcgatcggcagaaatcatccttcaaagacaagaaacgggcggagagcgaggcaagacgtacctttaagcgcctggcatgggacgcctacaaggagacgcacatcacacacctgggtggaatttactgggatgaagacgcttcccccgataaatttgatatagacgggcgggaggaaagggcaaaagacaacatactcacagatatccagtcaccaggtgctcttgctcaggccttaggcctgaccgtggccaagctgcgctggcttacatttcatcgcgatgtggacagcggaacacactataggcgttggcagataccaaaacgggacggaagtatgcgcactattaccgcccccaaactgcacatgaagactgcccagagatgggccctacgtaacgtattcgataagctgccggtccatggcgctgcacacggatttctcgccgcaaggtctattgttacaaacgcctccgtgcatgccggggccgatgttgtcgtaaaaatcgacatcgaggagttcttccctactatcacctttaggcgggtgaagggcctcctacgcaaagcgggcctctcagagcaggctgctaccttgatcgccctgctgtgtaccgagccacccagggagtcggtcaactttcggggcaaaacggtgtacgttgcttctggtccacgtgcactccctcagggagcaccaacttctcctgctattaccaatgctctgtgccgaagaatggatctgcgattgagcgggctggcaagactgctaggcctgaagtacaccagatatgctgacgatctgactttttcttggaagtgcccaacaccgggagctaaggctcctctgggggtgctgctgaggggtgtgaccacaattcttaagagcgaagggttcagaattcacaagaaaaagacctccattatgagaaaaggggcacggcaagccgtcactggcttgatcatcaatagcgaagttggcgccgcgagtgctcgagtgccacgagatgtgatcagaaatttacgggccgccattaagaatcgggaactcggcaggcctggaaaggagggcgaaacgctcgcccaactccagggtttggcggccttcgtctatatgtccgaccctgtgaaaggtcgcactttcttagaccgcatcgcaaagttgcaagctcctacaaagacctga

SEQ ID NO: 13712 - RNA, 1407 nt, synthetic construct
  source 1..1407: mol_type = other RNA
atggcctctaagctcgaaacaatggtgagtgcagctgctccagtggaaaaggaacagccagctcccaagtcggctcccactgaagagcagcttgctgcgagggcaaaagcacacgaggagcgggttctgaggtggaaacaggtccaggaagcgggcggagcggatgaatggatcagaggggagttgcgcaagaagggactgctggttgaatcagacccctcccgactcggcgatcgagaaaagggatctttcaaggagcaaaaaaaagccgaagcagcggagcgcagggctctaaaaaagcttgtgtgggatgcttatagagctacccatgtcgtgcacctgggtgtcggcgtccattggagcgaccacttcgaggctgaccgattcgatatcgagaggagggaagaccggctgaaggccaatgatttaccagagtataaggacgcggagggtttggccaaggcgatggggattgatgttcctacactgagatggttcagctaccaccgtgatgtggacgcagggactcattaccgccgctggcagatacccaaaagaaccggcgggtccagaacgattacggcacccaaacgaggtctgaaggcagcccagaggtgggtgctccgcaatatcgccgagaagctgcctgtgcacggagctgcacacggcttcctctctgcccgctcaatagtgacaaatgcccaagtgcatgccggcgctgacgttgtagtaaaagttgacgtcaaggatttttttccaactgtcacctggcgccgtgtgaagggcctcttcaggaaggcaggtttaaacgaggcaaccgccacaatgctggccatggtgtgcactgaagccccgagagatgtggttgagttccggggccggaccttgtatgttgccagcggccctcgtgccttacctcaaggagcccctacctccccagcaatcactaacgctatctgtctgaggctggatagaagactgagcggcctggctcgggtgctagggatggtatacacccgttacgcagacgatctcacattctcctggcggaagagtgacgatagggccaaggctcctgtgggggctttgctcggcggagtcaagaaaattctgagagcagagggatttgtgttgcatcccgacaaaactacggtgatgcgggatggcgacaggcagaaagtcacagggctagtcgtgaacaaagccgaaggtcaaccagctgcacgcgtaccgagagagacactgcgcaaacttcgggccgccatcaagaaccgggagctcggtcgacccggaaaaggcgacgaaaccattgaccagcttaagggaatggccgcctttgtatttatgtgcgacgccaaaaaagggcaggcctttcttgaccgaattgccaagctggaggggaaatga

SEQ ID NO: 13713 - RNA, 1305 nt, synthetic construct
  source 1..1305: mol_type = other RNA
atgtccgagacaccacctacatgggaggagatagcccaggtgggagatatcgaaagatgggttgttgcacagttgcaacaacgcgggctgcttgacgaagtggcggatcccgccaagctgtctggcaatgctctgcggcagtttaaggcccgacgtgaagaggaacgaaaagtccgaaaactcttaaggcagcaggcctgggcagcatatcggaaggcccacctggtgcaccttggcgctgacgtgttccaccacgacacccctgaccaggaccggtacgacctgccagaccccgaaacacgcagggagacaaatggcttgccagctctgaaggatgtgcaagctctggcgaaagctctcgacctcactatccctcagctgcgttggcttgccttccatagggaggtggactccgggagccactaccagtattggaccattccaaaacgcgatggaggccagagattgatctccagtcctaaaccgacactgaaaaagacccagcgctggatccttcggcagatggcggagagattgccggttcatggcgctgcacacggatttctcccaggaaggagcattttttccaacgcagctgtccatgccggcgcacgtctgttagtcaagctcgatattcgcaacttctacccaaccgtgacctggcggagagtcaagggtctatttcgaaagggaggttacggggagcaggttgcgactgtactggccctcctttgtaccgaagccccaagagagctactgcagttggacgggaagccctaccatgtcgcaagcgggcctagagcacttcctcaaggtgcccccacttctcctgccctctcgaataccgtatgcctgcggctggattgtagattatctggcttaagtcaaaaactgggattccggtatacgagatatgcagacgacctgactttctcatggcatgaacacagccctccgcccctgggtaggttactcaggtgcgccaggctgatcctgcagacggagggttttgtgccacaccccgaaaaaacgcgcattctcaggcggtcacgaagacaaactgtgaccgggctagtggtaaacgctgcccccgatcatagttcaccagcgcgcgttccccgcctcaagatacgcgaactcagggctgccctgcataatagactgcggggcaaacccggaaaggctggggagactcttgcccagctgaggggctgggtggcctacctacacatgacagatcccgataaggcaaagcctttcttggcccagttgaaccagctggaggctcgtggcgctgatgagtga

SEQ ID NO: 13714 - RNA, 1302 nt, synthetic construct
  source 1..1302: mol_type = other RNA
atgagtgagactccacctacatgggaggatatcgcacaggttggtgacattgagcgatgggtcgtaacgcgacttaggcaactggacctcttggatgaagtaaccgaccccggcaagctgacctcggcagcattgcatcaatacaaagccagaagagaggaggaacggcgcgtgaggaagcagttgaggcagcagggatgggcagcgttcaggcaggcacacctggtctacctaggcgccgatgtcttccaccacgacacccctgaccaggaccgctacgacttaccagatccagaaacacgcagagaagtgaacgcactgccggcccttaaggatgtgcaggcccttgccaaggcgttggacctgagcatccctcgactgcggtggctcgccttccacagagaggtcgatagtgggagtcattatcaatattggacaattcccaagcgcgatggtggggcccggcttatctcagcccctaaaccaaccctcaaaaaaacccagcggtggattctcagacagatcgctgagcgccttccggttcacggtgctgcgcatggcttcctgcctgggagatctattttttctaatgccgctgtccacgccggggcacatacgatcgtgaagctggacatccggcacttttaccccactgtcacctggcgcagggtaaagggcctgttcagaaaagggggatatggcgagcaagtggccaccgtgcttgccctcctatgtaccgaggctccccgggagttactcccactcgatggccagcatgtgcacgtggcgagcggaccacgtgccttacctcagggcgcaccaacatcacccgctctgtcaaacacagtgtgtctgcggctggactgccgcctttccggattatcccagaagttgggctttaggtatactcgatacgctgatgacctaactttttcttggcacgactcctccccacctcctctgggacgactgctgcgctgcgtgcatgctatactgaaagccgaaggttttgttccacaccccaagaaaacgcggatactcaggcgtggtcgcaggcaaaccgtcactggactggtggtgaacgagacacccgcaggaagccccgctagagttcctcgggcccaggttagaagactccgggccgctctgcacaataggctgcatgggaagcccggaaaagaaggggaaagcctggcacagctgaggggctgggtggcttttctacatatgacagatcccgaacgtgccaaaccgttcttggctcaattgaagcagctcgaagagcgtggcactgatgagtga

SEQ ID NO: 13715 - RNA, 1587 nt, synthetic construct
  source 1..1587: mol_type = other RNA
atgggtctgttcgactggatgttcaggcgaggtcgtaagagcgaccccgagccgattgctccttcgcctgtgtctcccccccctccatctgaggcacctggacgtcctgcccccaaagccgaacctcagccagaggcaacaggcgatccctatgccgccactgaatttttgcccgtaagtaggcaggaaatcgtggatgcagctaaggggggaaacctcctgagtacagcctttcagttcggacgtcagagcataattccacccgctagtgatccaagaacacagctcatcgacagggcaatggttacacacggcttactatccccagaagaactcaatgagattcaccgcgtcggggaggagtacgaccgcgtaaagcctactgatgccaatctagctgctgccgcaggacttgcgggtgcagctgctgtcaaagcatacagggaatccaaggaacgcgaaaaggagagaaaaaaggcagaatccgcggcgcggaaaaaagccagggccgatgccatccgccacagaagagcctcagatattatttttctcggcaggggggtatcgggcagactgcacttgaggatgtcagaccaacagcgcctcgccgcccacgaattacccgtgatgcataccccggctgatgtggcaggggcacttggtctgagcatcaaacagctacggtggttggcctatcacagcgaggccgctacgcgtacgcactacgtgaagttccaggttccaaagaaatcaggaggtatgcggacgttagctgccccgcataagacactgaagggggcacagcattgggtgcttgccaatgtcctgaataaattacctgtcactgaggctgcccatggtttcgttgccggcaggggcatcgtcagtaacgccaaccctcacgtgggcaaggctgttgtggtcaatctggacctcagcgacttttttcctacaataacctttcatcgcgtgcgggccgttttcgagcggtacggttatagcgggtccgtggcatctgtactggcccttctgtgcactgaatgtccacgggcaaccgttacctatgctggcactaagtatgaagctgctaccggaccacgaggattgccgcaaggagcccccacttctcccggactttccaaccaggttgcccggaaactggataaacgcttgctgggcgtggcagccaaactggggctcacctacacacgctacgccgacgacctgaccttctcaggcggaccagaattggcggggaagattggctggcttctggcgaaagtccggaacatagcccgggaggagggcttcgcagtgaacgagaaaaagacacgagtgatgcgccgatctaccgctcaaaccgtaactggcgtggtggtgaacgataagccctccgtcagcagagaggagctgagacgactgagggctatcctgcatcgagctaagaccgagggcctggaggctcaaaatagagagggcagacccaactttcggtcttggctggcgggaaaaatcgccttcgtcaatatggtgaggccagacgcaggggcgaagctcaaggcagcgtttgacgccctcgggagatga

SEQ ID NO: 13716 - RNA, 1572 nt, synthetic construct
  source 1..1572: mol_type = other RNA
atgggcctcttcgattggatgttccgccggggtagaaaggtcgaacctgacccggtagccccaccttccactgacgctagtctgaggggagccgccaagcctgctgaacctgcaccacctcccccacctgcggatcaatacgcggctacagactttctgcccataacgcgcgaggagatcgtggacgctgcaaaggaacacggccgattgttatggaccgcatttcagttcgggaggccctcccaaattcctccgacatctgatcctaggactcagatcatcgatagagcactggttacacacggcctgctgacccctgaagatctgacggagattcataccgtgggagctgagtatgacgaggttaaacccacagagatggctatcgccgcagccgcaggtttagcggggaatgccgcagtccaggagtatcgagaagccaaagaacgagagaaggctcgtaaaaaggctgagtctgccgcccgaaaaaaggctagagcggccgaggtgaagagaagacgcgacacagacataatttttttggggcgtggcgtctccggcagactgcatatgagactttcggatgaggctagccttactgcacgggggcttccagtgctgcatgctccagccgacgtcgcgaaggctttgggcctaacaatcaagcagctccggtggctggcttaccacacagaggcagcgacgcgaacccactacgtgaagtttgaaatcccaaaaaaatccggaggaatgagaacccttgccgcaccccataaacggctcaaagccgcccagcactgggtgctcgcaaacgtagtgaataagctcccgacgaccgatgctgcacatggattcgtgccagggcggggcattgtgtctaatgccaacccccacgttggcaaggccgtggttgtgaatctcgacctgagtgatttcttccccactattacctttttccgggtccgggcagttttcgaacgctatgggtacagcggcagcgttgctagcgtattagccctgctggccacagaatgtcccagggcctcagtgacttacgccggcaccaagtacgaggcggcaacaggaccgcgtggtctaccccagggtgctccaactagccccggcctatctaaccaggtggcgaggaaattggataagcgcctgcttggcgtggctaccaaactgggactgacttatactcgttatgccgatgacctcactttttcaggtgggccagagctggccggtaagatcgggtggctcctcgccaaagttcggcacgtcgccaaagaagaagggttcgctgtgaatgagaagaaaaccagggtaatgagacgctcagctgcccaaatggtaacaggagtcgtggtcaatgataagcctagtgtgtccagggacgagttacgcaggctgcgggccatactgcacagggctaagagcgaaggacttgacgcccagaaccgcgaaaaccgccccaactttaccgagtggttgagaggcaagattgcatttgtgtcaatggtcaggcctgacaccggggccaaactgaaagccgcattcgatgcattgtga

SEQ ID NO: 13717 - RNA, 1569 nt, synthetic construct
  source 1..1569: mol_type = other RNA
atgtctgcgttcgactggctcttcaggagaacccggaagccggatccagaaccgccagcacctccacccccattgcctcctccagtggccgatgctcctggttccccgagtccaccccctcctgtcgctgatccgtatggaagcgaattcctccccgtcactcggggggagatagtggctgccgcaaagtccggaaacctgctgagtacagcattccagtttggcagaccctcagtgataccccctaccagcgacccccgcacacagcttattgatcgcgccatggtgactgccggcctgctctctccagaggagctagccgaaatccatagagtgggcgaagagtacgaaaaggccaagccaacagaggcaaacttggctgccgctgcaggtttggccggagatgcagcagtccgggcctatcgggctgagaaggaaaggcgaaaggctcaaaaaaaggcggagagcgctgcccgcaaaaaagaccgtgccgaggctgtagccactagacgggctacagacatcatcttcctggggagatgcgtgagcggaaagctccatttacgcctcagcgacgagacaagactggcggagttcggccttccagtcctccatacccccgctgacgtggccaaagccctaggactcaccattacccagctgaggtggctggcctttcataccgatgtagccaccaggacgcactacgtgaaattccaagtgagcaaaaagtcgggcggtacacgaaccttggctgctccccacaagacgctcaaagcggctcagcgatgggtcctggccaacgtagccgcgaagttcccagttactgaagcggcacacggttttgtggcgggaaggggcattgtgtccaatgcagggcctcacgtgggcaaagccgttgtagtcaacttagacctctctgatttttttccgtcagtcgtgtttgccagagtcagggccgttttcgaacggtacggctattctggtgcagttgcgacggtgctggccctgctgtgtacggagtgcccaagagcagccgttacttatgccggcactaaatacgaggccgcaacaggtccccgagctcttcctcagggagcccctacatcacctgctctgagtaatcaagtagcccggaagcttgaccgacggctgttaggagtggcccggaaactaggcctgacttacaccaggtacgcagatgacctgacattttcaggggggcccgagcttaatgaaaaagtggggtggctgctggcaaaggtccgcaacgtcgctagagaggagggcttcgccgttaatgagcccaagacccgtgtgatgcgacgctccgcagctcagactgtcaccggggtggtggttaatgacaagccctccgtggatagggcagaacttagacgtctgcgcgctatcttgcaccgcgcaaaggcagaaggactggcggctcagaaccgcgatgggaggcctgactttcgggcttggctcgtggggaaaatcgcctttgtacgtatggttaggcccgacgctggcgcaaagctgaaagccgccttggatgccttaccaggatga

SEQ ID NO: 13718 - RNA, 1599 nt, synthetic construct
  source 1..1599: mol_type = other RNA
atgtctatgttcgattggatctttcgtcggaaaagggacgtcaccccttcagccgaatcagcacccccctctgttcctccaccccctgacccaaggccgcaacagcaggcaccgaaagctgaacctcaggctgaggctgttggcgacccctacagcgcctctgaatttcttccgatctccagacaagagatcgtggacgccgctcagaagcacgggaggctactcgctactgcttttcagttcgggagacagagcataatcccccccgtatccgaccctaggactgaaataatcgatcgcgccctcgtgaccaatgggctgctgagccctgaggagcttaatgagatacatagagttggagaggagtatgagaaggtccgacctaccgaacagggtatggctgcggcagcgggtctagcagggaatgcagctgtgaaggcttaccgcgaagcgaaggagcgggctaaagcaagaaagaaagcggagagtgccgagaggaaaaaggcccgggcagaagcagtgcgaagacgaagggccaccgacgtgatctttctggggcggggtgtctctggccgacttcacctccgcatgtccgatgaggcaaagctgaccgcactcggcctacccgtgttacacgctcctgccgatgtggccaaagccctcggactcacaatcaaacaactgcggtggctctctttccacaccgaagtggccactcgcactcactacgttaagttccaggttcccaagaaatcggggggcgttagaacgcttgccgcacctcataaaaagctgaaggccgcccagcactggattctgggaaacgtgattaacaagttcccagtgacagaagccgcccatggttttgtagccggccgcggaattgtgaccaatgctaatccgcatgtcaataaagcagtagtggtaaaccttgacctgagtgattttttccccagcatcgctttcttccgggtgagagccgtgtatgagagatacggatacagcggctccgtagccactgtcctggcactgctgtgcacagaatgcccacggaccgccgtgacgtatgctgggacaaagtatgaagccgccactggtccacgtgggttgccacaaggcgcaccaaccagtcccggattgtccaaccaggtcgctcggaagctggataaacgtctgttgggcgtggcggctaagctgggactcacctacacacgatatgctgacgacttaacgttctctggcggagctgagctggcgggcaagattggctggctgttggcgaaagtccgcaacatctgtcgagaggagggttttgccgttaacgaaaaaaagacaagggtgatgcgtaggagtgccgcccaggtggtcacaggagtcgtggtcaatgataagccatccgtgtcaagagacgaaattcgcagactcagggcaattctgcatcgcgccaaaagcgaggggctggatgcccagaacagagaggggcgggagaatttcagggaatggttagcgggaaagattgcctttgtgaacatggttcgcccagacgtcggcgctaaacttaagactgcattggattcattgggcgagcggcctgcctga

SEQ ID NO: 13719 - RNA, 1611 nt, synthetic construct
  source 1..1611: mol_type = other RNA
atgagcttgttcgactgggtgttcaggaggaagagagacgcagatactccccctgctccaccacctgctgcacccactgctccagcctcatcagataaagcgccctctggtaacacaacgtcaggtaccccaggggctaacgcccctcggagttctgaagggtccgaggaccagtacgcagccaatgactttctccccatcagtcggcaggaaattgtcgatgccgccaagaagcacgggcgactgctcgcaaccgcctttcagtttgggcgtcagagcattatccctccagtatcggaccctaggacggaaatcatcgatagggcgctggtgactcacggactgttgacaccagaggagctgaatgagatccatagggtaggggaggagtatgaaaaggtccggccaactgaacagggcattgctgctgccgctggcttagctggcacagccgctgtacaagcatatcgcgccgcaaaggaagccgagaaggagagaaaaaagcgtgaggccgaactccggaagaaagttcgggcggaagctgtgtggcgacggcgaacaactgacataattttcctcggccgcggtgtgagtggcagattacatctaaggctctctgacgagggtaggctgacggagctcggactgcctgtgatgcacacccccgcagatgttgccaatgccctggggctcactgttccgcgccttcgttggttggcgtttcacacagatgtggcgacaaggacccattatgtgaagttcagcgtccctaagaagtctggcggaacaagacagctggctgccccccataaatccctgaaagccgcccagcactggatcctcgccaacgtggtcaataaattacctgtgacagaggccgcacacgggttcgtagccgatcgtgggatcgttactaacgccaacccgcatgtgtgcaaagctttcgtggtgaaccttgatctgtccgacttctttcccagcattgcgttcccacgcgtaaggtccgcctttgaacgatacggatactcgggctgcgtggcgaccatattagcccttctgtgcaccgagtgtcctagggctgccgtgacctacgcaggcaccaagtatgaagctgcaactggaccccgaggcttgccgcaaggagcacctaccagccccggactgtctaaccaagtggcccgcaaattggataagcggcttctgggcgtggccacaaagctcggcctgacctacacaagatacgccgatgacctcacgttttccggagatgcagacgctgctgccaagatcggctggttgctgaccaaggtgcgacacattgcctctgaggaaggtttcgctgtcaacgagaaaaaaactagagttatgagacggagcgcagcacagatggtgaccggagtcgtcgtcaatgacaaacccagcgtctgtagagacgagcttagacgccttcgggcaattctgcaccgcgctaagagtgagggtctggatgcacaaaatagagaaaaactaccgaatttccgcgaatggctacgggggaagatagcttttgtttccatggtccgcccagacgcgggcgcaaaactgaaagctcagctggacgccgtttcatga

SEQ ID NO: 13720 - RNA, 1587 nt, synthetic construct
  source 1..1587: mol_type = other RNA
atgagcttattcgattggatgttcagacgccggcgtacttccgaacctgagccagtgcagcccccggtaccagtggaacctcccgttcccgcagttccaccagttacagccgctcccgagacgacaaagacagaaccagcaggcgacccctacgccagcgctgaatttcttccggtgtctcgccaggaaatagtcgacgcggccaggggcggaaatctgctgagtacggcattccagttcggccgatcctctactatacccccagcatctgatcctcggacacaactgattgaccgcgccatggtcacccatggcctgctgtcacccgaggagctcaatgaaatccatagggtcggcgatgagtatgatactgtgaagcccacagatcagtccatggcggcagctgcaggattggctggagcagccgctgtgagggcgtttagggaagccaaagagcgtgagaaagcccgcaagaaagccgaaagcgctgctaggcaaaaagctcgtgccgaggccgtcaaaagacgacgggccaccgagatcattttcctagggagaggcgtctcaggcaggctgcacttgaagcttagcgacgaactgaggctggtggcaaacggacttccggtactgcactctcccacggacgtggctcatgccctgggcttgaccatcaaacagctcagatggctggcatttcacaccgaggttgcaaccaagacccactacgtgacatttcaggttcccaagaagtcaggtgggatgcgaaccctggcagctccacataaagccttaaaggccgctcagcatcgcttgctcgagacagtggtggcgagactgcctgtgacagaagctgcccatggctttgttgccgggcgaggtatcgtcactaacgccggacctcacgtggggaaggaggtagtggtgaatttggacttgtctgattttttcccatccattactttcccccgcgtcagggctgtgttcgagcgctatgggtactcagggagcgtagctacggtcctggccctcctctgcaccgagtgtcctcggcaggcagtgacctacgcaggtactaagtatgagagtgctactggtccacggggactacctcagggagcaccgacatcccctgggctcagcaaccaggtagcccgtaagcttgacaagcgcctactcggcgtggccgctaagttagggctgacttacacccggtatgccgacgacttaaccttctcgggcggtcccgagcttgccagcaagattggttggctcctggctaaggttcggcacgtcgcacaagaggagggctttgccgtgaacgaaaaaaagactcgggtcatgcgccggagtatggcccaaaccgtaaccggggtggtggtcaatgataaaccttccatcgatagagacgaactgagaaggctccgagcgatcctgcacagagccaaaacagagggacttgatgctcagaatcacgaagggaggccaaactttagagcctggctcgccggaaaaattgcgttcgtgcacatggttagacctgacgccggcgcaaagctgaaagcggcgcttgacgctctggatagttga

SEQ ID NO: 13721 - RNA, 1587 nt, synthetic construct
  source 1..1587: mol_type = other RNA
atgtctgctttcgactggttatttcgcaggaagagaactccggagtcagaacctcccgcacaggctcctccagcagctcctgcaccagctaccccagtggcaacccctccagctgcctctgcacctgctcctcccaaggctccagcagccgatcccatgagctcagagttcctgcctgtgacccgagccgagatcgtggatgctgccgggaaaggcaacctgctttccaccgcattccagttcggcagaccctccattatccctccggcctctgatcccaggacgcaactcatagatagagccctggtcacaaatggcctcctcagtagtgaagagctgactgaaattcacagggtcggggatgaatacgaagccgtcaaaccaactgaggctggaatggccgccgctgcaggacttgctggagaagccgccgtgaaggcgtatagagaggataagggacgcagaaaagcgcaaaagaaagctgaaagtgccgaacgaaaaaagcagcgcgcggaagccgtaaaactgcggcgcgagacggatattatctttctcgggcggggggtcagcggcaagttgcatctcagactgagtgacgagtccaaactggctgagcggggcctcccagtgatgcatacacccgcggacgtcgctaagtttctgaacctgaccattaagcagttgcggtggctggcctttcataccgacgtggccacacggacacactacgtaaagttccaggtgcccaaaaaaagcggcggtgtgcgtaccttagcagcccctcatcagaagttgaaggctgcccagcacgcgatcctggcaaatatcgcgtcacgtttccccgttacagaggccgctcacggtttcgtggctggacgaggcatagtgaccaacgcttcgccccacgtagggaaggtggcagttgtgaacctcgacctggaaaactttttcccaaccgtggtttttcctagagtgcgcgccgttttcgaacgttatggctactccggatctgtggccactgtgctggcactcctgtgcaccgaaagcccacgcgcctccgttacgtatgcgggtgtcaagtacgaggcagcaactggtccgcgcggacttccgcaaggagcaccaacaagccccgcactctcaaatcaggtcgccaggaagttggatagacgactgcttggcgtcgccgccaagctagggcttacttacacgaggtatgccgacgatctaacattttccggcggggaggagttaactagcaaaaccggctggctcctggccagagtgaggcatgtagctcaggaagagggcttcacagtgaacgagaaaaaaacacgggttatgaggcgtggtgccgcccagatggtcactggagtggtggttaatgacaaaccctctattgacagggatgagctgcgaaggttgcgggcgatcctacaccgggcaaaaaccgaggggttagacgcccaaaatcgggagggccgccccaattttagagcttggctggtcgggaagatcgcttttgttcgcatggtaaggcctgacgcgggtgcaaagcttatggccgccttggacgccctggggtga

SEQ ID NO: 13722 - RNA, 1575 nt, synthetic construct
  source 1..1575: mol_type = other RNA
atgagcatgttcgattggctatttcgtcgcaaccgcaagaccgaaaatgtgccgcttgttcctccaccagctccagcccccgttgccgatgtaccaagggccgaagccaagccacaggccgctacaccctcaccagtggacccctacggttctgaattcctcccaatcacccggggcgaaattatagacgccagtaagaaagggaatctgctctctaccgcattccagttcggacgcccttccgtcattcctccggcagcagaccccagaacacacctcattgatagagcacttgtcaccaacggcttgctgactcccgaagacctgaccgaaatacatagagtaggggacgagtatgagaaagtgaaacccaccgagatcggaatggcagccgccgcaggtttggcaggagatgccgctgtgaaggcatataaggccgacaaagaaagacgaaaagctcagaagaaggcagagtccgccgccaggaaggctgcaagaatcgaggctgtcaaggctagacgggctacggatatcatttttttaggaaggggtgtttcaggcaagctgcacctgaggctgtcagatgaagcccggctagccgagcgcgagctacctgtaatgcacacacctgcggacgtggccaaattgctcgggctgtcgatcaaagaactgcgatggctagcctttcacacagaagtggccacacgcacacactatgtgaaatttcagatcccaaagaagtccggcggaatgagaactttggctgcgccccacaaaaaactcaaggccgcccagcattcaatattatccaacatcgtcagccgcttaccggtcactgaggctgcacatggatttgtggccggccgaggaatcgtgagcaatgctaacccccacgtggggaagaccgttgtggtgaatctggacctggaaaattttttccctactgtcgtatttccccgtgtgaggagcgtgttcgagagatatgggtacagcggcagtgttgccacgatcttggctctcctttgcactgagtgtccgcgggccacagtcacctacgctggtgtgcagtacgaggcctctaccgggccaaggggacttcctcaaggtgcccctacaagccctggcattagcaaccaagtggctcgaaagctggataaacggctgctcggcgtagcagcgaaactgggcctgacgtacacaaggtacgctgatgacttaactttcagtggcggcgaggccctgaactccaaaaccggctggcttctcgcgaaggtgcgccatatcgcacaagaggagggattcgcggtgaatgagaagaaaactagagtcatgcgtcgttctgccgcgcagctggtcactggtgttgtggttaacgagaagccctctatatcgcgggatgaactgaggcggctgagggctattctccatcgcgcaaagaccgaggggctggaagcacagaaccgggagggaaggcctaattttcgagattggctgattggcaagattgccttcgttagtatggtgcggcccgacgtcggggggaaacttaaggcggctctcgacgctttgtcctga

SEQ ID NO: 13723 - RNA, 1644 nt, synthetic construct
  source 1..1644: mol_type = other RNA
atgtccctatacgactggctgttccgacgcacccccaaacctgatcctgagccgacccctgaagccagaggtgccgatgcccctaggagtcctagtcctcctccacccccccaacccgcacaacagggtgtcaatgcaccaagatctcctcagcccccaacaactcccgagccgcaaccggtgactgatccgtatgccgcctcggactttttaccaatcactcggggcgaattgctcaagagtgcccaggctgatggcaatctcatgaggaacgcatggcagaccggccgaaccagcattattcctgatgctaacgaccctagaacgaagctgatagatagggccctggtcgcacacgggctgttaacacctgagcagctgatcgaaattcatcgagttggcgatgaatatgctcgcgctaagccggaaggcgaccccatcgctaggttcgcggggatggctggagaggcagcagtacaggcctaccgagaggccaaggccagactcaaagagcagaagaaagccgaagctaaggcacgcgaagaacgccgggccgaagaggttaaacaccggcgcgcaactgacatagtgtttctgggtcgaggagtgagcgggcggttgcaccttcgcctctctgacgaggcccgtcttgccgactttgggctgcccgtcctgcataccccagcagacgtggcttctgcactgggcctttctatccagcagctgcgttggttggctttccacacagaggctgctaccaggacccactatgtgaagtttgaagtgccaaagcgttccggaggcatgcgcgttctctctgcacctcacaaaaccttgaaggccgcccaacggtggattctagccaacgtggtaagcagattcccagtgcccgtcgcagcccatggttttgtagccggtaggggaatagtttcaaacgctggaccacacgtggggaaggcggtggtgctcaacatggacctggaaaacttttttccctcaatcccattcccaagagtaagggcggctttcgaacgacatggatattccgggagcgttgccaccgtctttgccctgttatgtaccgagtgcccccggacgactgcgacatacgcaggtgtgaaatacgaggtggcaacagggccacgtggactgccacaaggagcccctacttcaccagccctgtcaaatcaggtcgcgagaaagcttgatgctaggctgctcggcctcgcagccaaacttggccttgcctacactagatatgccgatgacctcacattctctgggggccccgagttccaggagaaagtgggctacttgatggcacgggtcagacacctggctgcggatgaggggtttacagtgaacgagaaaaagtcccgggtgatgaggagaagtattgcgcagtccgtcacgggagtagtcgtgaatgacaagcccagcatctgcagggacgaactgaggcgcctgagggctgtgttgcatcgcgccaaagctgagggcctagacgctcagaatcgggatggccgggagaatttccgggcttggctcgagggcatgattgcgtacgttagcatggttagacccgacgtcggagccaaattaaaggccgagttcgatcgcctgatcggggcatccaagacatga

SEQ ID NO: 13724 - RNA, 1473 nt, synthetic construct
  source 1..1473: mol_type = other RNA
atgcagcccttgccccctgccgatccatatgcagccccagattttctgcccatcgctagaggggaaattgtgtccgccgccgcaggtaaaaacctcatggccaatgcctggcaaaccggccgcacttccataatcccccccgcagatgaccctcgaacacgtttgatcgacagggcattggtgacccacgggctgctcactccggaggatcttgctgaaattcacagggtgggcgccgagtacgcacggctaaaaccttcactggagaatgtcgccctgcaagccggtttcgccggagaagcggccgtacaagcctatagagaggccaaggaacggctgaagcagcttaagcgggaggaggcagcccgacgcaagaatgaaagggctgaggccgtgcagaggaggcgcgataccgacgtcatatttttgggacgcggcgtctctgggcggctacacttacggctgagcgaccctgacagactcgccgagtatgggctgcccgtcttgcatgccccagctgaggtggctgcagcgttgggactgtctattaagcagctcaggtggcttgcttttcatacggaagcagccaccagaacccattacgtaaaattccaggtgcctaagcgtagtgggggtgtacgaacgctggccgcacctcacgccacactcaaaagagttcagcactggatcctggaacatgtggtgtcgaaattcccagtcacagagcctgcccacggatttgttccaggccgaggcatcttaagcaatgcgacaccccacgtgggaaaagctgttgttgtgaatctcgacctgagcgacttttttccaagcgtgacctttcccagagtgagagcagtattcgagaggcatggctatagtggtagtgttgctaccgtattcgctctgctctgcactgaatgtccaaggacttcagctacttacgctgggactccgtacgaggtggctattggcccacgaggactgccacagggagcacctacaagcccgggcctgtctaaccaggttgctcggagactcgacaagcggctgactggccttgcggcgaagttaggcttcgccttcacaaggtacgctgacgatttaaccttctccggagatcccgaacaggccgagaaagtcggttatctgctgtccagagtgcggcatctcgccgcagaagaagggttcaccgtgaacgagaagaagacccgcgtcatgaggcggaacgcagcccagacggtgacagggatcgtggtcaacgacaaaccttctgtgtcccgcgagctactccgtcagcttcgcgctattcttcaccgagcaagagctgaaggcctggatgcacaaaatcgcgcgggaagggaaaacttccgcgcctggctggacgggacaatctcatttgtcgctatggttcggcccgatgtcggcgcgaagcttcgtgctgagtacaacgctctgagtgagagaagctcatga

SEQ ID NO: 13725 - RNA, 1602 nt, synthetic construct
  source 1..1602: mol_type = other RNA
atggggctcttcgactggctcttcgggaggcccggtgctaaacaaccacctgctcccgctccagcccctcaagcagcagcttccgcagcagcccctggagcagctaaacctcaaaccaccgaaacaaagggtccgaagccccagccagctaaggcaccaaacctgtctgcctcggattttctgcctatcactaggattgacctgaaggagagcgcggagcagattgagagatggggaccctggttcggacggcgagatctgataccccccgccgataaccccaggacgaaactgattgatcgtggcctggtcacacagggactgatgacacctgaacagcttgtagaaatccacgaagttggagccgcaatggacagagtgcggcccatacagttccagatccaggctcagatagcgcaatcaggccaggccgcaatcgaagccaatcggcaaagaaaagccgagattaaggcccagaagaaagcggcaagtgccgaacggaagaaaaaacggtctgaggccattgcgcagcgtcgtgccaccgatatcttttttcttggcaggggcgtcagcggtagactgggtgagcgcaccagcgacgaaacgaagttgacccaattgggtctaccggtactggcaactccagccgatctcgcgcaggcccttggcttacctatccccaaactgcgctggctagcctttcacactgaagtcgccagcagggtccattacgtttgtttcactgtccccaagaaatctggagggacccgactgctgagcgcacctcacaggacactggccgctgctcagcagtggatcttcgctaatatcgtggggaaactgccggtggagccacctgcccatgggtttactccaggaaggtcaattctgacaaatgcacagccccacgtcgggaagaatgtggttgtcaatctcgacctcgagggcttcttcccgtccatcacttttccacgaattaggtccgtgtttttccggctcgggtatagtcctgcggttgctaccattctcgccttactttgcacggagtgcccgcgcaaacaagtaacatataacggcaagatctaccatgtagcgttaggtcccaggggacttccacagggcgcttgtacatcaccaggcttatctaaccaggctaccagaagactggacaagagattggcagggctcgccaagaagctgggcctgacatacaccagatatgccgacgacatcacctttagtggcaacgaggaactcaaagacaaggtggggtacttgatggcccgcatcagacacatagctgaggctgaagggttcgctattaatgaaaacaaatcacgcgtgctgcgtcgaaacgcagcccagactgtgaccggcatagtggttaatgatcgacctggagtgtcccggaaggatctccggcgcttgagggccattctacaccgcgctcgccatgagggtttggaggcccagaaccgcgccaagcggccaaattttcgagcctggcttgagggcatgatcgcttatgtgtccatggtgaggcccgaggtgggcaagagattgcgggaccagcttgctgccctggcacctaaaggagcatga

SEQ ID NO: 13726 - RNA, 1599 nt, synthetic construct
  source 1..1599: mol_type = other RNA
atgaatcccttagagcgtctgttggagtttctgggctttacaaagactgaggccgacacatccaagcctgctaaggggaaacccgcacctgctgatgccaaatctgccgcaggaggcagcgatgcttcgggtgctaaaaaaccgagcggacccgccgttgccaaaaccttcaatcttgatgcaagtgatctgctgccgataacctctgaagagctgaagtccggtttacgcaagttactgagatctggtggattcaggttcgtgggtcgtggcatgattccccacggagacgagcgaacccggctgatcaatagagcactcctctcagaggggttcctaaccgcagaacagcttgaggcaatcacccaggtggcggtggaatttgaagagttgcagaaggccttggcgagaatcgagggccaggtgaacaagtccgccaagaaagccgttgaggctgacaaggaggagaaggcccgaatcaaggcacaaaaaaaggctgaggctctggccaaaaagcaaaaacacgctgccgacgtcgcccaccggagagaaacggacataatatttctcggcagaaaagtcagtgccaagctgaacgaccggaagggcaacgcggaactacttgctgggtatggactgccagctatcagtactcctgccgaattagcagccgctttagggctctctgtggccaagctgcgctggctggccttccatacggaagtcgccacaagaatgcactacgtgcagtttcaaattccaaagaaatcaggcggtacacggctcctaagcgcacctcatcagtcccttgccgctgcccaagagtggatctatcgagagattattcagaagattccagtggagactcctgcacatgggttcgttaccggaaggtctatcgtgactaatgcccaaccccacgtgggtaatcctgtgctcatcaacatggatctggaggcatttttccccacaattacgtggcagagggtccggagtgtcttccaccgagctggctactccccatcagtcgcaacaattctggctctgatctgtacagagtgcccccgcgataccgtagagtacgcgggaaaaacttactacgttgctaccggaccaagaggactgccgcagggcgcttgtacttcacctggcctgagcaatctggtggcccgtcggctcgacaaaagactaggcggcttgtgcgggaaactgggactcacatataccaggtatgctgacgatctctccgtaagcgggcccgccgaaatcaacgaaaaggttgggtacttgatggcccgcattcgccacatcgcggaagcagagggtttccaagtaaatccaaagaaaacccgagttttgaggcccaacaccgcgcagcttgtgactggcatagtagtcaacgcaaaacctagcctgccaaaaaaagaactgaggcgcctgagggccattttgcatcaggctcagaagaatgggctggacgcgcagaaccgggaacagatcccacattttcgcgcatggctcgccgggaagataagcttcgtgcggatggtgaggcctgaacttggcgctaagctccaggcccagtttgatgcactttga

SEQ ID NO: 13727 - RNA, 1611 nt, synthetic construct
  source 1..1611: mol_type = other RNA
atggggttctgggacttcctgcccaagttgtttaagccagtgccctcggaaagtccaccgccgtccccttccccaatccctgctgagcccgtggcagaaacatttgtgcctgtgcctccaatgcctgtggctgaacctccagctgcaccccctccaggtcccatagcagtcgcaccaccaccagccgccccttctttccttccgatcacccgcgatgatctcctgaaacaaggtgaggaggtcaggagaacaactggatggatgttctttggccggcgcgacttgattccccctacttcagatcctcgcaccttgctgatcgatcgcgggatggtcactcagggactgctgacacccgatgagctcgcagagatgcaccgggtaggagacgaacatgctaagcacgccgataggtttaggcagatcactatcaaagctgggcagacggctgaccaagccgtagaggcagacagagccgctcgagttgccattaaagcccagaagaaggcagccgccgcagcgttcaaacagacccgcgctgatgcagtcgctgtcaggagggccaccgacattatctttgtgggccgcgacgtgtctgcgatgatgaacgatcgctccagcgatgccgagcgcctgaaagcagccggactacccgtcctgcatacgccaagtgatctcgccgccgccttggggttagcgattccacagcttcgatggttatgtttccacaccgaggttgccaccagacctcattatgtgcaatttgaagtgcccaaaaaggcaggaggcacacggacattggctgcaccacacgccaagcttgctgccgcgcaggagtgggtgcttgccaacgtattagctaaactccccactgaggaaccagcacatggcttcgtcccgggccgctctacagtcacgaatgccctcccccacgccggaagagacgtggttgtaaatgtggaccttgaaggctttttccccgcggtgcggtttccgagggtaaggcacctgttcagaaggctcgggtatagcggtgctgttgccacactgctcgctctgctgggcactgagtgcagccgaaaacgggttgtgtacgacaagcagacctatttcgtagccatcgggccacgttcattgccccagggggcttgcacctcacctgcagtgtccaaccagatagcacggaggctcgacagacgtcttgccggtttagctaagaaactggactgggcatacacccggtacgctgacgatctgacatttagcgcacctcctggccatcgagaacaggtgggctacctactagctcgggtgcgtcacatggccgccgctgaaggatttgctctgaacgcgaaaaagactagggtgcagcggcccgaaagtaggcaagccgtgaccggcctggtggttaatgccgctcctgcggttccgcgtgacgtggttagacgggtcagagccattctgcaccgagcaaagcacgagggtctggatgcgcagaacagaacaggacatcccaatttccgaggctgggtcgaggggatgatagcctacgttgctatggtcaagcccacccagggtgaggccctgagaaagcaatatactgctctctga

SEQ ID NO: 13728 - RNA, 1062 nt, synthetic construct
  source 1..1062: mol_type = other RNA
aaggcgacagatatcatgttcgctgggaagggcgtgtcagccttgctcggcgatagagcctctgacgccgacaaactcgctgccgcaggattgccggtcctgcatacaccttcggaccttgccgcagtgctcggcctgactatcccaatgctccgctggctgtgcttccataccgaagccgccacgaggatccactacatacaatttgaggtcccaaagaaaagtggggggaccaggaccttatcagccccccaccgtactcttgcagcagcacaggagtgggtcctaactaacatactgagcaaactgcctgcagaggaaccagcccatgggttcgtacccggaaggagcaccttgactaatgctgccccccacgctgttcgggacgttgtggtcaatttggacctggaagggttctttccgagcattggctttgcaagaatcaggcacgtgtttaggcgagtaggctattccggtgctgttgccacactgctggcactgctctgtactgagtgcccccgcaagcgggtagtttacgcaggaacgccctacttcgtggctaccggacctaggggcttaccacagggcgcgtgtaccagtccagccctatctaatcaggtggctagaaaactagaccggcgactcgccgggttagctcggaaactgggcctgacctatacgagatacgcggatgaccttaccctgtcctcaggccccgggtttcgcgatcgtgtcgcctatcttattgcccgcgtccgacacattgctgctgatgagggatttgtagtgaacgctaagaagactagagtcctgcggcccgagtctagacagctggtgacaggactggtggtgaacgccgctcctgcggtgcctagacatgtggttcggcgtctgagagcgatcttgcatagggctcgcacagaaggcctggccgcccaaaacagggatggacaccctaatttccgcggttgggtggagggtatgattgcatatattgccatggcacggccagacacaggtcgcatccttcgggccgctctcgaggaactccctcgatcctga

SEQ ID NO: 13729 - RNA, 1632 nt, synthetic construct
  source 1..1632: mol_type = other RNA
atgaatattttgagaaggctactggggtggattctgggacatacaattccacctgcgccaccatggccaaaggtgccagctccacctccgcctccatcaccagcatcgcctgaacggccttcagggccagagcctgagatgttaggggccgctggtccagccaaaccagtggagaaaaaggatcggccctatgggtctatccccgaggactaccgtccgatcagcagggaggaaatcctggaagcagccgcaggaagaagtctgttctccaacgtctggtttggccgcagagacagaatacctcccgctgacgatccgcgaacagcattgatcgatagagccatggctacccagggattcttgtcccccgaacagttggtggagattcacactgtcggtcacgagatggagagatttcggcccaccgtcgaggggatttcccaccaggctggattggctggagcagccgcagtggaagctgaccgagcagagagagctcgaataaaagctaggaaaaaagccgaagcggaggaaaggaaacgcctgagggccgaagggatcgcccttagaaagcgtgaggacatcacatttctcgggagacgggtgagtggtcggttaggtgagcggacctctcgcgtagaagatctcgaacgctcaggcctgcctatcctcgccactcctgcggaagtagcccgtgccatgggcctgagtgtgtctcgtcttagatggctcgccttccatgccgaggtggcttcacgcgtgcattatgtccagttcagagttccaaaaaaaagcgggggcgagaggatcttgagtgctccccataggagcctacgccttgcacaggaatggatccagctggaaatcctccgcaaactgcctgttggtcccgaggcccacggcttcgttccaggacgtagcatcctgaccaatgccacacctcacgccggaaaggcgctagtcgtcaacctagacctggaggggttttttccctccattggcttccccagggttcgcaaggtgttcgagcatctggggtattccggctccgtcgctaccattctggcacttctgtgcacggagtgccccaggaaggccgtgactctggatggagaaatgcttcacgttgccaccggccccaggggattacctcaaggtgcctgtacttctccagcgctgagcaaccaagtggctatacggctcgatcgccggcttgcaggaataagcgcaaagctgggatttacctttacgcggtacgccgacgacctcacattctctggcgatgcagaggtggaagcgaaggtgggctaccttcttgcccgagctaggcacattgccgagggcgaggggttcgcagtaaacgaaaagaagactcggatactcaggagaaacaatcgacaggaggtcacaggcctggtggtcaatgaacggccgggcgtgcccagagacgaagtacgtcgcctcagggcaatcctccaccatgctcgggccgaaggcctggatgcccaaaatcgggagaaccgacccgacttcagggcttggctgctcggcaagattgcctttgtgcgcatggtgcgacccgaggttggtgatcgcctgttggcggagctgagacagttagacgctagctga

SEQ ID NO: 13730 - RNA, 1611 nt, synthetic construct
  source 1..1611: mol_type = other RNA
atgaatgtttttaggcggctgttcggctggttgctcggcagacggttaaaacccgcccccagtcttcccgcaagtaggccagctgcacctggctccccacagtcacctatgaccgtggcacctacccccgctgaagtggtggcgaaaaaaggacgctcgtacgggctcgatgccggggattacctgccaatctctcgggaggagataaaggaagccgcccgaggacgctctctgttcgcaaacgcctggttcggcagacgggaccggattccccctgcagacgaccctcgtaccgctacgatcgatcgcgctatggctacacagggattcttgagcccggaagagctggctgagatccacgccgtgggcgaggaaatggaaagactaagaccaacagcagagcacgtcggtcaccaggcagcattggccggagttgctgccgtcgaggctgatagggctgagagagctcgaatcaaagctcagaggaaggcagaggccgccgaaaggaaaagactgcgggccgaagccattgccttacggagacgcgaagacatcgtattcctggggcgcaaagtgagcgctaggctgggtgagcgtgcttctcgtgtggacgatttacagcgggcaggcctgccagttctttctacgcctgccgagctggcgttggccatgagagtctcaatacctagacttcggtggctagcgtttcacgcagaggtggccactcgggtgcattatgtgcaatttagagtccctaagaagagcggaggcgagcgagtattgtccgctccgcgatcatccctgagacgtgtgcagcgctggattctggatcaggttctaaaaaacattccagccgggccccacgctcatgggtttgtagcggggcgcagcattctcacaaatgccactccccatgcggggaaagccgtggtggtcaatctggatctcgaagacttcttcccatctatcggctttccacgggttaggaaggtctttgagcaggccggatattcaggcgcggtcagtactatcctcgcgctcttatgcaccgaatgcccccgtaagaccgtgacatatcaaggagaaaccctccacgtagcaactggtccccgaggtctgccacaaggcgcctgtacctccccggtgctgagcaaccatgtcgccataaggctggacagaaggcttgctggggtggccacgaagctgggattcgcatacacccgatatgccgacgatcttacattctccggccctagcgaggtggatgctaaagtgggctacttgctcgccaaggttcgccacatcgcacaggaagaggggtttgctatcaacgccaagaagactagggtcttgcggaggaatgcacggcaggaggtgacaggcctcgttgtcaatgacagacccggagtgcggagagacgaaattcgcaggctccgagctattctgcaccgcgcacgcactgaaggcctggcttcccaaaaccgagaaggaaggccggactttagagcctggctgctgggtaagatagccttcgtaaggatggcgcgccctgaggttggtgagcgtcttcttgccgagtttcatgagatcgatagggggcgcagtgcatga

SEQ ID NO: 13731 - RNA, 1671 nt, synthetic construct
  source 1..1671: mol_type = other RNA
atgtccatttggcaacgcttcctgcagtttatctttggtgagagatccttcaggcccgccgagcctccacccactttttcccccgccgttcctccctcactggctgaacgtcccactacagccgaagctccgcggctcaccatccctgaagcttctgccgacccggatttcgcagcggatgctggaacccataaagatgggcaaccaaagctcgcaggaaaagccgttgatccactggatgcaggagcttatcttcctatttctagagaggagatcaaaagggaagcaaaggggaagaatttgtttaacaactttgccttcggcaataggagcataattcctcccgccgacgacctgagaactaaactgatcgaccgagcgatggtgacacatgggcttctgagcccggagcagctacacgaaattcacgcagtgggggcccgcatggatgagttgaggccaacgatggcagctgtggagcacaaagcagccaaggcaggagaagccgccgttgaggccgacagagaggcaagggcccgcttaaaggcacagaagaaggcggaggctatcgagcgaaaacggctcagagcagagggcatcgcataccgcagggctactgacattgtgttcctcggaaggggcgtgagcggccgtttaggtgaccggacctgcgacgcaagtaaactggaggctgccgacctccctgtgatcgcgacaccaaccgaactcgccgctgctctgggggtaagtgtcccacgcctgcgttggctggcctttcataacgaggccgcaactcgggttcattacgtccagttcacagtgccaaagaaatctggcggaacacggactctgtcagcccctcatcggagtttggcagaggctcaggactggatttttcgagaaatactggctagactgcccgtggaaccaccggctcacggatttgtgacagggaggtcgatcttgaccaacgcgtcaccccactgtggcaagagaatagtggtcaatatggatctggagggctttttcccttccattggcttcgcccgggtccgaagcgtgttccaaaggttggggtactctcctgccgccgccaccatcctgggacttctttgcaccgagagccctcggagatccgtagtgtatgacggggtggcataccacgtcgcaactggccccagaggcttaccccagggtgcctctacctcccccgctttgagcaatcaggttgctcgacgccttgatcggaggctgagcggcttatcgacccgtcttggactggcttatacgagatacgctgatgatctgacattcagtggtgatgaagcctttgaagggcgcgtcggctatctgatggccagggtacgccacttcgccgctgaggaggggttcgctgtcaacgaggccaagtcacggattctgcgccagggtactgcccaaaccgtcacgggacttgtggtgaatgacagaccaggcgttcgacgagaggaagtacggagactcagggctatattgcacagagcccgtaccgaagggctcgaagcccagaaccgcgaaggtcgccccgactttcttgcatggctcaggggcaaaatcgcgttcgtggccatggctcggccagagacaggtgcgctactcaaggcggaactcgaggcgctactggccggatga

SEQ ID NO: 13732 - RNA, 1536 nt, synthetic construct
  source 1..1536: mol_type = other RNA
atggcagccccacctcccacgcctgaagcatcgacagatccgtatttctccgcccgaaccgatcctacgaaggaagcgagccctaagaaagttgatcccctggacgccggggactatctgccaataactagggaggagattaaggaggaagccaaagggaagaatctgtttaatagcttcgctttcggccttagatcagtgattccacctgccgatgatctgcggaccaagctgatcgatcgtgccctagtcacccacggcctgctgtcacctgagcagcttcgggagatccacgacgttggggcccggatggaggctatgaagccaacaatggcggcagtggaacacagggctgctagggctggtgaggcagctgtcgctgcagatcgtgaggctcgagcgcggttaaaagcccagatgaaggccgaaagcgcagagcgcaaacgcattagggatgaggccatctctcagagaaaagctaccgacatcctttttttggggagaggcgtttcgtccagattgggagatcggactggtgacgcgtcaaagctggctgaggccgggttaccggtggtatctactcccgcagagctcgctgcagccttggggataagcgtgcccaagctcaggtggctcgccttccacaacgaggccgctacccgtgttcattacgttcagttcactgttccaaaaaagagcggtggcacaagaaccctttctgccccccatcgctctcttgccgaagcccagggctggatactccgggaagttctcgctaaactcccagtggaacccacagcccatggctttgtcacgggccgttctattctgaccaacgcctctccccactgccggaaacggttagtggtgaatatggacctcgagggatttttccctagcatcgggtttaggcgggtgcgcagtgtgttcggacgattgggctattcacctgccgtcgccactatcctagctctgctctgcaccgagtgtcctagaaggtccgtcgtctacgcgggcgaaacctatcacgtggctactggtccccgtggactgccccaaggagcatgtacatccccggcactctccaaccaagtaacccgcagactggatcgccgactgggcggtttggccagtaggctaggccttacatacagtcggtacgccgacgatctgacctttagcggagacgaggtgctcgaaggacgcgtcggctacttgatggcacgcgtgcggcatttggcaggtgacgagggcttcgccgtgaacgaggcaaaatccagggtcctgaggagggggactgcccagactgtgacagggctggtggtaaatgaccgcccaggagtccgcagaacagaggtgcgacgccttagagcgattctgcacagagcaagaagtgaaggactggcggcacagaacagagaaggccatcccgactttctggcttggctccgaggaaagatcgccttcgtagccatggcacgaccagacgtaggggctgctttaagggctgaactagaatccctgctggtgcggtga

SEQ ID NO: 13733 - RNA, 1938 nt, synthetic construct
  source 1..1938: mol_type = other RNA
atgctacgcagaagcgctgtggtggattctgctcctgagactgctagccccagagtgctgttcttttggcctggagcagtagccgttcgccgagctgagtccacagtggtgccaggagtgaggttacagccccgcgccagcgtcaatacgttgggacggcgctttgaggttggtcagcgccctgtccccgttctgccaacccctaaccctagcgcaggcgatatgaatctgtttcaccgactgcttcggttcctctttggatatgaaccccccgccagaagcgcttcccagcctagacctacaccagccccagcacctgcacccgaaccaccaacaacaccagacgccattgcagcgactctgactgaggccttcgggaaaactgctgaaaccacggcgcctgcattgcttcctgacgccacggccgatccatacttcgcagtgacagccgatgtgcagagtaccgcaactaaccagggtaagggcaatgggaagtcttctcttggcctagaagctaacgcatacctgcccatctccagggaggaaattaagaaaacggcgaagggtattgatcgttttgggaacccatggttcggaagacgtgacctgatccccccgaccgacgatccgaggacaaatctgatcgacagagcaatggttacacagggcctgctttccccgacccagttgcatgagatccacgacgtcggcgcaaggatggatcaaatacgtccctccttggcggcgatagaaagcagggccgctgtagatggagcagctgccgtagctgccgacagagaggccagggtgctgctcaaggccagaaaaaaagccgaagcagcccagcgaaagcaggagcgcattgaccaagtggctcaccgcaaggctaccgatattgtgttcttaggccggggggtcagtgccggcctgaatgatcgacaatcagatctcgatgcactgaccggagctggcctgcctttgttgtctaccccagcagatctggccgctgccctctctctctcaatctccaaactgaggtggctggcttttcacactgaggccgccaccagaacacattatgtgcagtttactgtcccgaagaaaagtggtggcctgcgaactctcagtgctccccacaggaccctagccgaagcccagcgatggatcttccaggagatcgtcgcaaaactgccagtggagtccgctgcccatggctttgtagccggccgtagcatcgtctcaaatgcggaggctcactgtcggagggcagttgttgtgaatatggacctcgaagcctttttcccgtcgataggatttcccagagtccggcgggtattccggaaattagggtacagccccgccgttgccacaatccttgcgctgctgacaaccgagtgcccccgcagaacagtggtgtacggtgggactacataccatgtggcgaccgggcctagaggactcccacaaggagcgtgcacctcaccagggctctctaatcaggtcgccatcaggctagacaggaggctcagcgggttggcccgcaagttcgacctctcatacactcgctatgcggacgatctgactctgtctggcgacgctaccttggaggccaaagtcggttatctgatggcacggcttaggcatattgccggcgaggagggcttcgctgtgaacgaagccaagagtcgcgtgcttcgacaagcaaccgcccagaccgtgacgggcctggttgtgaacgacagacccggtgtaagacgggcagaagtccggcggttacgcgccatattgcaccgtgccaagtcggaagggctcgcatcccagaaccgggacggacaccctaactttctggcttggcttcatgggaagattgctttcgtggctatggccaggcccgaattaggcgctgcactccgggctgagctggactcacttctgtga

SEQ ID NO: 13734 - RNA, 1575 nt, synthetic construct
  source 1..1575: mol_type = other RNA
atgggatttttctcacggctcatcgagcgcttgttcggcaagacagataccggagttattgtgcccaagcaggcagccccaggtgcaactgctggtgcagcacctcaagctgcgcctcctctggctaggcccctgaatctctctgcggataatttcctccccattgctcgggacgaactgaaggaagccgccaaggacgttaccagatgggggccctggttcggtagacgggacgtgataccacctgccgatgacccccggactaggctgatagatcggggtatggtggctaatggactcttgacccaggagcagctcgtcgaaatccaccaagtgggagcagagatggagaggctcagaccattacagtttggggtgtctaatctggctgctcaggccggagagtccgccgtacaagctgaacgcgctcgtcgcacggaaataaaaaaacagaagaaagccgaagccgcggacagaaagaagcgcagggccgaggcaatcgtacagcgccacgccaccgatattgtgttcttgggacggggcgtttctgctcggctgggagaacgcactagtgacggcgagaagctgaaaagcctggaccttccgatgcttcagacccccgctgaactggcgtccgccttagggattggcgtaccaagactgcgatggctggccttccatgcagaggtggccaggcgcgtgcactacgttggatttaccgtcccaaaaaagtcaggcggcacacggacactttctgccccgcacagaagcttagccgcagcgcaggagtggatccttcgaaatatcctggatagattgccagtagaggccagtgcgcatggttttgtgatcgggcgaggaaccttaacaaacgcaaacctccatgtgggccgagctattcttgtcaacatggacttgcaggacttctttcccagcatcggctttccacgagtccgtagcgtcttccagcgcctagggtactcccctgctgtggccaccgtactcgctctgctctgcactgagtgcccccgaagacctgtggagtacgatggccagtcgtatcatgttgctattgggcctagggggcttcctcagggtgcctgtacatccccagccttgtcaaaccaagtggcacgacgcctggatcgtaggctccatgggcttgctctgactctaggggtcacatatactagatatgcagatgacctgacgttttccggagctgcggaatttaatgcacgggtgggctatctgatggccagaatacggcacatcgcagaagacgagtgtttcgccgttaatgccaggaagagccgcgtcctgcggaggaacaccgcacagagggtcacgggtctggtggtgaacgacaaaccgggaatcggccggcaagaggtgaggagattgcgcgccatcctgcaccgtgccgctaaagaggggctcgaacagcagaacagagagggccgtcccaacttcacagcctggctgcacggcaagattgcatacgttagtatggtcaggcctgatctaggggcaaggtttcaagcccagcttcacgccattctgcagggcaaatga

SEQ ID NO: 13735 - RNA, 1938 nt, synthetic construct
  source 1..1938: mol_type = other RNA
atggctgataaggccacaactgagaagttcgagctgtacgtggtggaccttgttaagtcagggcaaacatttactgcatcagatgtggtcatcggagcccgagcccggggaattgacgttaggcacaacgagagcagagacattattcacgatttgcatcgaagaggggttcttggtcccgcttacagccgtaccaccgtgccccttactgactcaacccgtcccttcgtgtaccacccaacaaacatcaacccgagcgagtaccgaagcagcttcactgacgtctctagctccctgagatccgggcataggtcccagcctaagagaggcttcttagggcggctgatccagtccctgtttggcggaggcgatgatgagtccaagagtggtcgaaaacagcgctctggtgatcagcctgcaccagcggacctgtcatcaaacccgtccgtgccacctaagagcagtcgtaggatgccacagcggcgcaagaatgtaacccttgaccttgatgccaagagctttcttcccatagatagagatgaactgctgtcttctgctaagaaggtcaacctgtgggcttccccatggtttggcagacgggacctcattcctcctctggatgatccccgcacaaatctcattgatcgggggatggtcgcagaaggactcttaacctcagacgagttgagacgcattcacgaagtgggcgcggagatggacttctatcgccccgatgatctcctgctgaggcatcaagcccaacgcagcgccagtggagccatagaggctcagagacaggccagtgcagaacgaaaggccctgaaaaaggcggaagcagccgaacgtcggcaacagagagagaaggagattcagtatagacgggcaaatcagatcgattatctaggcaggcgggtcagtactcagctgcacctgtgccaatctgatgccgacaaactccaagctgtgaatctgccagtcttacatacgaccaaagacctcgcagacgccatgggcatcgaaattagtaggctcaggtggctggcctttcacgaagatgtagcaagccgcatacactacgtgtccttctctatacctaaacggtcggggggcaccaggacattatctgcccccttgcctagactcgcagccgcacagaggtggatttacgcgcagatcctacgagacttgccggtaggcgattgtgtccatggctttgttccagggaggggtatcgtctcaggtgcccagccgcatatcggtcaagaggttttgctcaacatggacttggaggacttctttcccactatcggcttcgctagagttcggcatgcttttcactggttggggtattcgcccgctgtgtccactgtgctcgctctactttgcacagaagcaccacgcagggaagtgtcctaccagggtacagcgtaccaggtagccacggggcctagggttcttccacagggcgcctgtacctctcctgccatttctaatctcgtgaccgagcgcttagaccgccgcgtgattgggtttgcgaataagttcggactgacctacacaaggtatgctgacgatatgacgctgagcggcggaactgacttcgccggacagatcggatatgccatcgctaaaatccggcacatagctgaagaggagggcttccgggtcaaaacatccaagacgcgggtactgaggcgaaatgccgcccagcgagtgactagtctggtcgtgaatgacaaagcaggagtggggaggagaaaactaagacaggtgcgtgcaatcctgcacaacgcttcgaaaaccggactgcaggctcagaaccgcgacaaccatcccaactaccgggcgagcctcgagggcatgattgcttatatcgctatgaccagacctgaccaagccgcaacaatgcgcgccaaactggacgccatcgcagattga

SEQ ID NO: 13736 - RNA, 1644 nt, synthetic construct
  source 1..1644: mol_type = other RNA
atgtcaatggctgataaggccacaaccgaggccgttgaaagattcgtgatcgaactggtgaactgcgatgaggcctttaccgcagccgacgtgacattaggggctcgggccgcaggaatacaggtccactattctgatagcagaaatatcttgcacgacctgcaccgacggggtatccttggaaccagctaccagagatcctccgtgcaactgactgacggcacgaagcccttcgtgtatcacccggtaggtttcacagctaatcattataggagcaaccagtcttcgctgatggcttccgatcacccagatcaggtaagccaacccaagcccgggctactggccaggttaaaacagttcttgttgggcaggggagactctgatcggagcgactccagcaaggatgctaggagtctggccaaccaggctcctgcaactcaggcaaccagagccgcacagagaaagaacgtcactctgaatctaaatgcaccatctctgctccctatctcccgcaaagagcttcttgcgggcgcaaaatccattaatctctggtcatcaccctggtttggacgccgggacgtgatacctcccatcgacgaccccaggacactcctcatcgaccgcgctatgatcaccgccgggctcataactccagaagagctggcacgcattcatgaggtcggcgctcagatggacaggtacagacccgacgagctgctgatgagacatcaggccaatcgagccggccgtgatgccgttgcagaggatagacgcgctaaggccgaacgaaaagccgctaagaaagccgagagcgaagccaagcggcaacggcgacgcgaagaaattgagatcagaagggccactcggatcgatttcttggggcggcgcgtgtccacgaaactccatctgtgcgagagtgatgaagaacgccttaatgcagccggacttcctattctccataccaccacagagctcgcggatgcgatggggattcagctcagccaactgaggtggctggccttccacgacgacgtcgcttcgtcaacgcactacgttgagtttgacatccctaagagagcgggcggcgtgagacgtctatctgccccattacctcgtctggccgaggcgcagcgatggatttactctcaaatcctgcggggaatgccagtggacgattgtgtgcacgggtttgtgccgggtcgtggtacagcaactggagccgctccacatgtggggcaggacgttatcttgaacatggaccttgaagacttctttccttctatcggattcgcacgtattaggcacacgtttgaaaggctgggctactccccagctgtgtcaacagtacttggtctgatttgcaccgaggcacctcgccggaaagtcagttttcagggcgccacctattatgtcgcaaccggtcagcgggtcttgccccaaggagcttgtacaagtccggcactctctaacctagttgcgggcaagctggaccggcgcatcttaggcttcgctaaatgtataggggccacttatacaaggtacgccgatgatctgactctgagtgggggtcaggatttggccaaccgaattggctacaccatagctaggtttgtaattagcgcgagaaccaaggctagtggctga

SEQ ID NO: 13737 - RNA, 1635 nt, synthetic construct
  source 1..1635: mol_type = other RNA
atggccgaccagtcccccaatcaagcttccaaccaacagcccgccagcccaaatcctaagctgggatggctgggtcggattttccggtccctattcggaggcccaaccagacgccccgacagaagctctgacagtttcgccgccatggcccaacagccaagaccccttcctcccaggcgtagggagaaggttacgctggacctggatgccaaagcattcttacccattgatcgcgacgaactgcttagcgatgcgaagcagataaatttgtgggcgtcaccctggtttggccggagggatctgatacccccagccgacgatccgcgaacctcgttgatcgatcgcggcatggtgacagaaggcctgttgacacctgacgagctgacacgcatccacgaagtaggggcggagatggactattataggccagccgaactgttcctcaggcatcaggctaggcaggcgggtcgtgatgctgtcgagctggatcgccaaacgagggccgagcggaaagcaaggaagcaggccgaggccgaagctaagagaatccggcggagagaacgagttgaaagacgctttgcaactcagatcgactttctcggacgcggcgtgagcacccagttacacttgtgcgagtcagatgtggatcgtctcaaggaggcaggcctccctgtgatccagaccactactgagttagcagacgcaatgggaattgaaattccacggcttagatggctcgcttttcactctcacgtcgccgaacgaagtcactacatatcattccgtattccaaagaaatcaggcggtacaaggactctgtccgcaccgcttcctcgccttgctgctgcacagcggtggatttactctcagatcctccgagagaggcctcatccagagtgtgtgagcgggtttgttccgggccgaagtatcttgaccggagcagcccctcacgtcggatctcagaccgtactgaatctcgatctggaggacttctttccgtcaatcggattcgcccgcatcagacacgccttccagtttatcggttattctccagcggtcgctactgtcctggctctcctgtgcagcgaagctccccgacgtaaagtacggttcaacggtggggagtactacgtggctactggccctagggtgctaccccagggcgcatgtacgtccccagccttatccaacctgattgccgcaaaactcgacagaagaattagcgggctcgcttctaagctgggagccacctatacccggtacgcggacgacctgacccttagtggcgacagagattttgatgataaagcagcattcgctatggcgtgcgtgcgccatattgccgaggatgaagggtttcgcgtcaaactgtccaaaacaagggtgctgagacaaaacgcagctcaacgggtgactgggcttgtggtcaatgacaaggccggagttgggaggaagaagctgcggttgataagagccatcctacacaatgctgagaaaacaggcctaaacgctcagaatcgagatcatcatcccaacttcagagccagcctggaagggacaatcgcctttgtggctatgagtaaccctgagcgcgcagccaagttgaggcggcagctcgacgccgttcctgactga

SEQ ID NO: 13738 - RNA, 1962 nt, synthetic construct
  source 1..1962: mol_type = other RNA
atggctgattcaaacgcgcagaagattgtcacggacattactcgcaggagagctgccgcgggtgagagcttttcagcttttgacatcaccacggaagctcgcagccagggagcctttattcggcacggagaggcccgcgaccttgtgcaagctctcttccagaacggatctatgggggccgattatcggagaactgtgctcgacctaggcggcggtgctagacccttcgtgtaccataggtttgacgctgatttgacaacatatcgatcgaccgcatctggagcagcacccgtatctcctccagcgaatcgaccaggacaggctacacctccggcggttggtcaggggagcacaagtgggagaagcggcggcctgattcgtagggtttggaacttcctgggcgggggcaccacatctgatgctggtaaccccactacggacgatgccacacactctggttctaagacccccagccctgccaatcctgacaatccaaagaccacggggactatccgcaaagtgcttaacttgacagcatccgcattcctgcctatccagcgcgatgacttaatacgccaggcaagtggactgagcctgtggagtaatatctggttcggtcggagagatatgataccgccagtcaacgaccctcggaccctgctgatagaccggggtatgctgtcagccggcatgctgtctgcagaggagctcgccgagatgcaccgtatcggagatttgtatgcaaagcattccggcgaggtaacaaggattaggtccgaaggggcactagcagggcaagccgctgtcgacgcagacagacaggccagagctgaagccaaagccaagaaaaaagccgaggccgctgagagaaaggctaagaggagggctgaaatcgagcatagacgtgcgaatgacattctcttcttggggaggggcgtatcccaaggccttgccgatcgaacaagtgatttggccaaattagagaagctggagctacccctggcatccaccccagccgaactggctgccgttatgggaactactgtttccaacctcaggtggctagcctttcatgccgatgtggcaactcgcacccattacgtgtcatttgagatcgccaaacgatccggcggagtgcggaaactcagtgctcctcacgtgagactggcagcagcccagcgctggatttacagtagcattctgaggggcgtgaaggtacatgatgccgcccatgggtttgtcccagagagaagcatagtgacctcggcaaagttacacgttggacaggccgtcctcatcaatgcagatctggaaaacttcttcccaagtatccactggacccggattcggaaagtcttccgttgcctcggatactcacccgctgtggccactatcctggctctcatctgcactgaatgtcctcgacgggaagtcgtgtacgacggtcagacctattacgtagcgacaggcccaagaggattgccgcaaggcgcttgtacttcccccgcgctgagcaatctggtggcaatgaggttagataggcgcctgtccggcctggccacaaaatttgacatcaggtacacccgctatgctgacgacattaccctttcaggaggcgacgagcttggccggcgattagggtacgtgatggctcgtttgcgccacattacggccgatgaggggttcgcgatcaacgaaaagaagacccgcgtgcaacgaaggcaccaagcccaggtggttaccgggctgatagtcaatgatcgggtgagcgtcacacggaaagagctgcggagacttcgttctatcctgcaccacgccgctaccgaaggcctcgactctcagaacaaacaccatcaccccaattttagggcgtatatgtccgggatgatcgcctatgttgctgcaactagacccgccctcgcccgagaaatgaagaagcagcttagccaggtgcggtcatga

SEQ ID NO: 13739 - RNA, 1932 nt, synthetic construct
  source 1..1932: mol_type = other RNA
atggacaacaacgcccggcagatagtaacgactatcactcgccgaagagcggccgctggggaatctttcaccgcctttgatattacaactgaggccaggggccaaggcgccttcgttccacatggggaagcacgggaccttgtccaagcactttttcagggaggcgaaatgggggctgcctaccgtcgcaccgttatcgacttgggtggcggcgctaggcctttcgtttaccaccgctttgacgtggacgcgaggacctatcagacgccttccggatcaagacctatcgtgccaactcccacacctgctgccccggttccaaatgctcctacagccgatacaagttcatctagcccccccacgaatcagggcggactgatccggcgtgtgatgaattttctcggtggatctgctcgaagcgatgttgccgccaacaaccccagtgcatccacatttggcggggctgcagccccaccaagtagaaggaagactctgaatctggatgcatcagctttcctgccgatcaccagggacgaaatgatgagagagtcccggacaagcctgttctggagcggggcttggtttggtcgtcttgatctgatccctccaaccacagaccgacgtactctgctcatcgaccgcgggatgatgtcggcgggcttactgtccgcggaacagctggccgagattcacaggataggggaactgtattccaaatatgcgaaggatctgcaggtgatccaacatgcagggcaggtggctggtcaagccgcggtagacgccgacagaaaggcccgagcggaagcacgccaaaagaaaaaagccgaggcccaggaaaagcgcgagaagcgacgagcggaaatagagcaccgcaaacgtaatgatatcgtctttctaggcagaagagtgtcaggcgggctcgccgacagagagtctgacgtgggtaagctccggagcctcgagcttccggtactctccacgcccgccgagttagcagccgctatggatctcgctattagtgacctgaggtggctggcatatcacgctgatgttgctacacggagtcactatgtatccttcgatatccagaaaaagagtggaggccttaggcggttgtccgcaccccataaacggttgaaagcagcccagtcttggattctcgagaatgtgctgggttctgctgttgtgcatgatgccgcacatgggtttgtgcccggaagatctaccataactggcgccaaggagcacattggacaagccattgtgttgaacgctgacttagagaattttttccccagcatccactggaccagagtgagaaaagtgttccagaccctgggatattcacccgctgtggcaacaattctggcactcgtctgcaccgagtgccctcggagagaggtgcagttcaacggtcaggctatgtacgtggcaacaggacccaggggattgccacaaggcgcttgtaccagtccaatgctcagcaacatggtcgccctgcgtttggatcgccggttagccgggctggcaaacaagttcgaaatgaagtacaccagatacgccgatgacctcacacttagcggcggcgatgaacttggacggcggctaggatacgtgatggctaggctgaggcacattgccgtcgatgaaggtttcgcaatcaatgagtcaaagacccgcgtccagcggagacaccaggcacagagcgtgaccggcctgattgtcaatgaccgagtaagcgtctctcgctccgagctaaggaggttgcgggccatcctgcattcagctaagtcgcagggactggaatcccagaacagggacgatcatcctgactaccgcgggtacctgactggcctactcgcctatgtcgcagccactcgccctgctttagccgcggagatgaaacgagagcttgacagcattaggaactga

SEQ ID NO: 13740 - RNA, 1935 nt, synthetic construct
  source 1..1935: mol_type = other RNA
atggccgacgcccagacaaacaatgcagtgcagcaggctgtcctggattttgtgcgctctatgactatgtttaccgcctacgacgttaccctggccgttcggaaccagggagttgtggcccggcacggtgaagtgcgagacgtcgtgcattccatgtttcaggacggcatactcggggcagcatggcaacggaccgctgtggatataggcacagatactcgccccctggtctatcaccacttcaatcaggaccctcgcacgtataaaagccctagcacagggtcagccgcaaaacccgcaactaactcgggccagtcaggttccccctctccaggctctgctgccagtggcagtgggaaggggtttttccagcgaattgtcggcgcattcttcggccaaggtagtagccctgtgactccgtctaatcatcccgcgagcggaggtgcgcaagtaccatcccaaccgctgagaaccccaaagcaaaggccccccattaccattgacctggacgcatcagcctatctccccattagccgaagtgatctactctccgaggcaaagaaaacgaacctgtggggatctccatggttcggaaggcgggatctcattcctcccgttgaagacgataggacaaaattgatcgacagggccatgctgacccaaggcttactgacgccggagcagctaacagaaatccaccgggtcggagcggagatggacaagtacagacccgatcagctactcatcaaccaaaaatcccaaaaggctgggcaggctgctgtggatgaggaacgtcagtcaaaggctgctctgaagaagcaaaagaaggaagaggctgccttacgtaagcagttgcatcggcaggctgtagcggacagaaaagccaatgacatcgtttttcttggtaggggcgtgagctccaggctgggagacaggacaagcgatgacaccaaactgcaggccgcagggttgccagtcatgagcacaccatctgatttggccaatgcattgagcatcactgtgccccagcttagatggctggccttccactccgatgtggcgtcacgcacgcactacgtgaacttcaccatccccagaaagtccgggggagtccgcattctctctgccccacatcagaggattgccgccgtgcaacagtggatacttgctgaggttgttagtcggttgcctgtggagggctgcgcccatggattcgttccaaatcgtagtatcctgactaacgctcgacctcacgtaggccagcaggtcgttctgaatatggatcttgagaacttcttccccggaattacctatccacgggtaaggaagatgttccagactatcggttattctggctccgtcgccacaatcctcgcactgctgtgtaccgaatgtccaaggagaactgtaacctggtcaggtgaggtgtttcacgtggcgtgtgggccgagaggactccctcaaggagcttgcacctcacctgcaatatctaatcaggtggtgaagcgccttgatcgccggcttcagggcctagcgcgcaaacacaacctggtgtttacacggtacgccgacgatttaacattttccggggggagtgactttgacactaatgtggcctgggtgatggcatgcgtgagacatatcgccgaagatgagggcttagtggtcaatgaaaaaaagaaccgcgtgctgagacgaaataccgcacagattgtcacagggttggtagtcaacgataaaccttcggtcagcaggaaaaagctgcggcagatacgcgccatcctccatcgagcccagcaggaaggccttgagtcccagaaccgtgacggccaccctaatttcagagcttacctcgacggatacattagctttatcagcatgaccagacctgagatcgccgctaggctgaaagagcagctggctaacgtttcgtga

SEQ ID NO: 13741 - RNA, 1941 nt, synthetic construct
  source 1..1941: mol_type = other RNA
atgaccgacagtactacccggcaggtagtgtctcagttagtgctcaatcaggtggccgccggggccatgttcactgcttatgacattaccctccaggctagaggccggggaatgcaactgaggcacggtgaaggccgcgacttagtccatgaactgttcaacaccgggagaatgggcacggactacacccgcacagtggtggatcttgggacggatgcaaatcccatggtatatcacaggcgaggggactctccccgtacataccaaagcggatctacaggagcaactgcggccagtgcaccaccaggtgccttacccacacagccttttccaccagccgctgcaccacctgccaacactccgggtctaattggacggctggtgaagggactgtttggaggagggaaagaccagcctatcgtcggcagagttgtcggagacgggggtaacgcggcctcaggtgatgatgtcggcgcattagcattgcggcccccagcgagcctggatcttgatgcctccgactttcttcctatctccagagatgacctaatgtccgctgctaaaaccaccactctctggggcaatccatggtttggtagacgtgacatcatccctcccatcggcgatcctagaactaaactcatagatagggccatggtggctcgaggaatcttgacacccgatcagctggctgagatacataggattggggctgacatggaccattacaggcccacccagattttgattgagagccaagctcattctgcaggcaggtccgcaatcgaggtggatgataagcgtaaggcggaagaaaaggcgaagaagaaggccgaagcgaaagagcggaaggagaaacgacaaagcgacatagctgaacggaaggccaccgacatcgtcttcctgggacggggcgtttcggggcagcttcacctgagagattcggatgcagagaaactggcagcagcagacctcccaattttgtctacaccagccgagctcgcctcagccttgggattaactatatccaagttgcggtggctcgccttccataacgatgtagccacaagaacccactatgtcaggttcgagatcccgaaacgcagtgggggcactcggcagctttcatctccacacaagctgctggctgagaagcagcggtggattctgaaagagatcctgaataaactgcccgtggaagattccgctcacggcttcgtcagggatcgggatattctaacaaatgccatacctcatgtgggcaaggacgtggttctgaatatggacttggagaacttcttccccagcatcgggtttccccgcgttaggcaggtttttaaaggactgggctactcaccggcggtggcaaccattctcgccctcctctgcactgaatctccccgtagagcggtgacgtatgccggccagccttacctggtggccagtggacctcgcggtctacctcagggggcctgtacaagccctgccatttccaatcaggtcgccaaacgacttgaccgcagggtgcaaggcctggccaccaagttcggcgtggcctttacgcgctacgctgacgacatgacagtgagtggcggagcagaaatgactaccaggataggctatatgatggctaagctccgccatatcgctgaggacgaggggtttgtcatcaacaggagcaagacaagagtactccggagaaacactgcacaaatcgtcacgggtcttgtagtgaatgacaagccgacagtgagccgcacccagctgcgaagaattcgagccatcctgcatcacgctcaccacgatgggctgtccgctcagaaccgtgaacagcacgctaactttcgagcctggatgcagggtatgattgccttcgttgctatgacccgccccgagctggcaaaagatttcctggcacagcttcaatcagttcgcgactga

SEQ ID NO: 13742 - RNA, 1569 nt, synthetic construct
  source 1..1569: mol_type = other RNA
atggccaacgggatgttgcagcaattgatagcacggatgggaagaatcttcggcagcattttttgctcatacaagaggagtccaggcactcagtcgagggccacgactgcacctgcacaagggcaggcggttaggcctgcgtcaaggccagaggctccacctttacctcccagggccaataagaccctcgatctcgcagctagccaatttctcccgataagccggagcgagttgctcgtggccgctaaaggtactcgactgtggggtaatgtgtggttcggaaggcgcgacttaatccccccagctgatgatgccaggacactgttggttgatagaggcatggtgaccgaggggctgattacccctgaagaactggccgagattcacagggttggcgccgagatggatctacatcggcctgcgcaggctgccatacagcatcagactcagaaggccggccaggctgccatcgacgaattgcgagctgaaaaggcccgcatcaaagctgaaaagaaggtcgaatctgcggcaaggaaagcagcacgccagagtgccattgatcagcgcagagctaacgacattgtgttcctcggcagaagagtttctggtaaactgggccaccgggaatccgaccctcaacgtctgcaacagcttaatctccccgtgcttcagacaccagcagacgtggccgtcgctctgcagatctccatcagccagctacggtggctggcctttcacgccgaagtggccgagagaactcattacgtctacttcgatgtcccgaagaaaacaggggggtttcgccggctttcctcaccgcacgccaagctcgccgctgtacaaagatggatcttagagcaagtccttaataaactgcctacacagccagcagcccacggattcatagcgggccggaacattttgtccaacgcaatgccccacgtgaaccagagcgtcctgatcaacatggatctcgagaatttttttcccaatatcacattcccccgtgtacgtgagatgttcgccagacttggctactccggggcagtgtctacagtgctggccctgctgtgtaccgaatgcccacggagagctgtgatctttcatggtgctacgtaccaggttgctaccggaccaaggggactgccccagggagcatgtactagtcctgctatctcaaaccaagtggctgtgaaactggacagacgactacagggactcgccagtaagatggagctgaattatacgcgatatgccgacgacctgaccctctctggaggggacgccttacgcgagagagtgggctatgtaatggctcgagtccgccactttgcggaggaagagggtttcagggtaaacaaccagaaatctcgcgtccagaggcggaattccgcacagattgtgaccggcctggtggtcaacgaacgtcccaccgttagccgagagaagattcgccgcattcgggcaatccttcaccgtgcccaaacagagggtctggaggcacagaatcggcagaaccatccctatttcagagcgtggctggaagggtacattgccttcatcgcttga

SEQ ID NO: 13743 - RNA, 1545 nt, synthetic construct
  source 1..1545: mol_type = other RNA
atggatgtggtgagtctccccgaccatcgcccagggagatcaccggtgagttcagtcgacaccagtaaaagccgtcgcagtgctccccctgccccattcagcttccttcccaagattaagagcgagcggaattttcttgacctgcgcggggccgccgatctttgggatagaggatgtgtcgttgggttctggggtcgattactgcggctgatattgggtcagaatgcagggagcggcttgaccgagcagctccaggcatcaggcactgctaagtcccggaacagatctagcgttttctttcccgcccaatccctgcaggctcctcagctgctcccaccagcttctgtcgccgagacagttgtaggtcccgttggcgcagaagggtcgcgcattaggagcaccctttccgtcgtggctcgcagggaggcacagcaacgtgccagagacaacgaacgacgtcgattacgtgaaattcgacggaccgatcggctgagtcgggacatcacatacctggggcgcggagtctccggatggctgaatgaacggattagcgatgtggcgcgcctccaatctgcgggtttgcctgtgctctccggacctgcggatgtggccaaagcactggggatatcgctgcagagcctgcgtggtctggcctttcacgccgaagtgacaagactgacgaactatctccgatttactgtgcccaaacggtccgggggccagagagagctgtctgtccctcataggcgactcgccgctgcccaacgatggattttgaggactatcctggaccgactcatcgtctctgagcaggcccacggcttcgtgtccggaagaggagtgctgacaaatgcccaacagcattgcggccaggcggtgctactgaacctggacgtgcagaacttcttcccatctatcagtttcgcaagggtgcggagggtttttatggctgctggatactcaaagtgcgtggccactatcttggctctcgtgtgcacggaatgtccccgcagggaggtggtatttgagggtagaagactctgggttgccacaggcatcaggggcctaccacagggtgcctgtacttcccccgccctgagcaatctcgtgtgtttaaggcttgatcggaggctacagggattggctatgaagttgggccttgtatactcccggtatgcagatgacttaaccttttctgggggcgcagatcttagacagagagcaggcgccgtgctgaagtcagtaggcgcgatccttggaagcgagggcctgcaggtacacccgtggaaaacacgcgtccagcctcgctctaccgcacaagtcgtaaccggactggttgtcaacgaccgtcctggcgtgtgcagaagagaggtgaggagggttagagcaatactgcacagggccgctaccgagggactagagcgccaaaatcgggacggccacccaaatttcgtcgcttggttgaacgggaggattgggtggatcggacagtcacgccctgaattaggccggaaactgatggaagaactgagggggctccggtga

SEQ ID NO: 13744 - RNA, 1407 nt, synthetic construct
  source 1..1407: mol_type = other RNA
atggccaccggattttgggggaggatcctgcgcgcgctgttaaaaagcgatgattctgaccagagtgcctctgcagccagcccaaacgtgacagccgccgactcagtggtaggtgaatccaccgttgcggctgccgcgggtttaaccaggcgagcattcgaagccccccacctgctccctgtcggcaagcaaagcgagtccgcagggagtggccgccaaacacagagcgacgatgcaagtggcagcagttcaggccgtacctccctggcagttgccgccagacgtgaagctaggcggagggctcgcgaaaacgaaaggttgcggcttcaagccattcgccggaccgaccgactgaaccgcgatataacctatctcggacagggggtgagcgggtggctaaatgagcgggtcagcgatgaagagaggctgcgacagtctggcctaccagtgctggccacaccggcagacgtagccagagctcttggaatttccttgcgctccttgcggggccttgcttttcatgctgaggtgactaggctgaataattacgtgcgcttcactatccccaagcgctctggcggcgttagagttctgcaggcaccacagcgacggctcgctgcagtacagcagtggatcctgagggaaatactggaccgtctgcccgtgtctgctcaggcacagggcttcgtacggggcagatcagtggtgacgaatgctgctctgcattgcggacaggccgtggtccttaacttagatgtgcaggagttctttccatccatccctttcgcgcgggtccgaagagtgttcatctcggctggctatagcaagtgcgtcgctacaatactggccctcgtctgcacagagtgtccccggcaagaacttacgtttgagggaagaagactctgggtggctagcggaccgaggggtcttcctcagggtgcctgtacctcaccagccctctccaatctcgtgtgcctgaggttagaccgtagactccaggggctctctgcaaggctggggctggtctactcccggtacgcagacgacctgacttttagtggaccagccgagctaagacagcgggtgggtgccgtgcttaaatcagtaacagggatcttgcaggcggagggcctgcaagttcaccctgggaaaacccgagtgcagcctcggtctactgcccaactggttactggcctagtcgtgaacgatagacccggagtcagacgcgatgaggttcggagaattagagctattttgcatagggccgcgagggagggtttgcaagcccagaaccgcgagggacaccccaacttccgcgcatggctctgtgggcgtattggctggatcggacagtcgcgacctgaactggggcagcagtttttgcagcaactgaatgccctccagtga

SEQ ID NO: 13745 - RNA, 1620 nt, synthetic construct
  source 1..1620: mol_type = other RNA
atgagtactcaggattccagggggttctttggctggctgcgccgtcttttatttggggacccgattcccgcccccaaacaggctgctgcctctgctgctacatctacacacgggacagccaagccggtgacaacggcccagaacccagcgcaacagcagaacgcaccttctctcaaggctggactggatgcgagttcttttttgccaattacgagagatgagatcatttcctccacccgtaccagatggctatggtccggggcattctggggcaggagggacttgatacctccagtttcagacactagaaccaagctgatagatcgcggcatgctgactcagggcatgctaaccgccgaacagctggctgaaatccatcgtgtaggcctggaaatggatgccgtgcgaccaagcatgaccctcatccggtcagaagcagaaaaagccggagccgaagcagtggttgcctctcgcgaggaacgcaagaagataaaagctcaaaaaaaggaggaggctgccagaagaaaagagcagcgtgcaagggatattgcggctcgattcgccactgacattacctacctcggacgaagagtctccggccggctcaatgaccggacatcagatgtggccaagcttgaggccgccgctctacccgtcctccaaacaccagctgatgtcgctggggcgttaggcctgacaatcccccagttgcgtgggctggcatttcacagcgaagtaactagcagatcgcactatatccagtttagtatccctaaaaagagtggcggtgtcaggttgctgtccgcccctcacagaaggctggccaactgccagagatggatccatacccagatcctttcaaagctggaggttgctgcacaagctcatggattcgtagtggcccggtcaaccgtaactaatgccactcctcattgtgggaaggcagtggtcttcaatacagatctggaaggcttctttccttccatcacgttcccccgagtgaggaaggtgttccaaaggctcgggtatagccccgcggtggcaaccattcttgctctcctgtgcacagaatgtccacggcggaccgtggaatttggtggccagacactgtttgtggcaactggtccccgagcattaccgcagggtgcatgcaccagccccgccttatcgaatcaggccgcgctccgcctggacagaaggtttcaaggactcgctacaaggatggggttgacgtacactcgctacgccgacgacattaccttctctggaaatgaggagctgaagagccggaccggctatctgatggcgcggatccggcatgtggtccaggacgagggattcagggtcaacgaggccaaaaccagagttcagcggcagagcacagcccagagtgtgaccggtctgatcgttaacgagaggcctggcgtgttgagaagcaaagtgcgacgccttcgcgcaattcttcaccaagccaaatcttccggactggaggctcagaaccgcgacaagcaccctaatttccgggcttgggtcgagggaatgattgcctatatagcaatgagcaggccagacactgcagaggttcttcgccagcagtacgcccaaatcagagagacgtga

SEQ ID NO: 13746 - RNA, 1614 nt, synthetic construct
  source 1..1614: mol_type = other RNA
atgctttttggaggttcaccccgaccgaggcctgctgcaaggactccagccagacctgcccctggaagggcagcatctcccggtggtagtcaaccgacagtgcagcccacagtgagtagcgcctccccacctaggcctagcggtcttggcaagcgactgcaagctcctgacttaaccccgctcgccgggtccgagttaaagcggtccctcagacagagaggtcagtcatcgtggtccatatttggaggggcctcctggtggggaaggagggatctggtgccacctagcactgatgaacgcaccaacctgatcgaccgagggatgatcggtcggggactcacctctgccgacgaggtagccgaactgcacagggtgggcgacgagatgctgcagagggaccccagaagagatggaggtgctgccgccggcgaaatagctgtgcaaaaagaccgggccgagagagcgcagcagaaacagcagaagagagaagctgctgcacagcggcgtgccgaacgagcagctgcagtagccgcgcgtagagctaatgatatcatttttttaggacgcggggtgtccaaagggcttgcggacaggacaggcgacgcgactagactcgtgggagcaggcctcccagttctggctactcccgcagatgttgccaccgctctggagctgcctattccaagactgcggtggctggcattccacgccgatgctaccgctcagccccattacgttcgcttctctgttcctaagcgctcaggcgggacacgcgacttagcagcgcctatgccccggctcaaggctacccaggactggatccttgctaacctactggccaaagtgcctacccacgccgcggctcatggatttgtcccaggccggtccacagtcagtaacgccgtgccccacctgcaagcactggcagtcattaattgcgacttgaaagatttcttccccaccatccatgtgcatagggtccgcgggtgctttgaggagttggggtatagcccggctgccgccactatccttgcactgctctgcactgaagccccacgacgcctggtggagtacgcaggaagacccttgcacgtcgccacaggcttgcgctgtcttcctcaaggggctccaacgtctcccgcgttgagcaacctaattgcccggaggctggatgcacgttgtctcggcatcgcccgtaagttggggttcacgtatagccggtacgccgacgatctcagcttttctacccatgaaccggcggccctcgctcgaatcggctatctacttgctcggattcgccacatagccagagatgaaggcttcgccgtgaatgagaaaaagacgagggtgttgcgaccctcaagttctcagagagtcaccgggatcgtggttaatggagccgagccccggattccacgcgctactgtaagacggctgcgcgcgattctgcaccaagccgaaaagacaggcctggaggctcagaaccgtgatggccacccagacttcgccaattacctcgcaggcatgctggcttgggtaaggatggtcagtccacagcaggctgagccactgctagccgcttggcgtcgcgttaggcggtcagcagcagattga

SEQ ID NO: 13747 - RNA, 1611 nt, synthetic construct
  source 1..1611: mol_type = other RNA
atgcaactcctctttggagctcccccacgacctaggccagctgcaagacctccagcacgaccagcccctgctgctcctaacgctgccgctcctacttcagcaagaccagaaccccgacctgctccgcccagacctgctgatgtgggccacaggctggaggcacccaacctcacacctctggccgcctccgagctgaaaaggtccctgcggcagcggggacagagttcttgggccatcttcggcggggcatcttggtggggacgtagggatctggttccgccatctacagacgagagaaccaacctgattgatcggggaatggtcgggcgggggttgactactgtcgacgagctggccgccatgcaccgtgtaggcgatgaaatgctgcggttggaccccagacgagatggaggtgccgcagcaggggaagcagccgtacaggctgacagagccgaacgcgcccgtgtcaaacagcagaagaaggaagaggctgcccgaaggagagcagaacgtgcagcagctgtagctgcccggagagcgaatgacatcgggtttctcggccggggagtgtccaagggtcttgccgacagaagcgctgatgccgctaggcttggcggagctggcctacctgtattggctaccccggctgacgtcgcagccgctttgcaactgccaatccctcagctgcgctggttagcattccacgcagaggccaccgagcggccacattatgtgcgctttaccgtgcccaagagatcaggtgggacacgggaccttgccgctccgatgcctagactacgcgcgacccaagactggattcttgccaatgttcttgccaaagtgcccacccatgccgcggcccatggctttgttcccggaaggagcactgtgtctaatgccgcaccccacttgaggccactagcggtggtgaactgtgaccttcaggacttcttcccgactatacacgttcaccgcgtgcgcgggtgtctggaagagctaggctactcatccgcggcggcaacgatcctggctctcctgtgtaccgaagctccccgccgcctcgtcgagtatgcaggacgacccttacacgttgccaccggcccacgttgcttaccacaaggcgctcctacgagccccgccttgagcaatctcatcgctcgaaggcttgacgccaggtgcctgggcattgcccgtaagctgggcttcacgtacacacggtacgccgacgatctgacttttagtaccacagatcctgaggccctggccaggattgggtatctgctggcgagaataaggcatatcgcccaggatgaagggtttgctctcaacgagaaaaaaacacgcgtgttacggcccagttgcagccagcgggttaccggtattgtcgtgaatggcgaccagcctcgcatacccagggcaacagtccgcagactgcgcgcaatcttgcatcaggcggagaagactgggctcgaggcccagaaccgggatggtcacccagatttcgcaaaccatgtggcgggtatgctcgcctgggtgagaatggtgtcgccccaacaggccgaaccattagtggcagcgtggcggagggcccgaaggaatgatgccggatga

SEQ ID NO: 13748 - RNA, 1731 nt, synthetic construct
  source 1..1731: mol_type = other RNA
atgcctttggcagtgggtggagtcggaatggggtggtttgattggctgaagccacggaaaacgcctgacgagggtcctccagctcctagccctggcctgacgcatggcgacctgtctgggctggtcgcacaacctggacctccgaccccaggaactgtccccacggatccacgggtggtgactacccgcgtcccaaccacacaggagccagcgacacctaccgtagcctccgctggaacacccgcatctgcatcacgggccgctaggcgaagtccctcatctcctccaccagagtcgctggactacgacctggggccatttgctccgatttcacagtccgacctgagagcccaggccggcaaactcactaatgcttggcgcaccctgtatctgttcggacgaacatcgcgaattccgcccgcaaatgatcccaggaccaacttaatcgacagggccatggtgagcggtggcctcctgacacctgaggaactggcagagattcacgccgtgggcgaagcctatgatcgcgcaagacccgatttacaggtggagctcgccaaggctgaactctccgccgtactacccgaacaggagagagccgaacggaaagcccgcaaaagggcggaagcagcagaaaggaaaagactgcgcgcagaagctgttgccgagagaagggcaaccgacgtggtgtttctgggtcggggcgttagcacccaactccacgaccgcacttcagatgccgaggccttggcgaagctaggactccccgtcctctcaacccccgcagatgtagctgctgccctgtccgttacaataccccagttacgatggctcgccttccacagcgaggcttccactgtgtctcactacgtgagatttgaagtccccaagaggagcggagggactcgccagcttgctgcaccacaaccgcacctggctgctgcccaagcctgggttttggctaatgtactgtcccgggtgccaccccatgatgccgcacatggattcgtgcctgggcgaagtactgtcactaacgccgcccctcatgttggcagggcagtggtggtcggcgctgatctgaccgatttctttcccacagtcacttttgcccgcgttaggggcgtgttccgccagttgggttacagtcccgccgtggcgacagtgcttgcgttgctatgtactgagagtcctcgacgcaccgtgacctatgctaacagaccatttcacgtggcgacaggtcctagggctttaccacaaggggcgtgcacgagtcccgccctttctaacctagccgcgcggagactggacagccgtctttccggtatcgggaggaagcttggcttcgcttacacaaggtacgcagatgacctgaccttcagcggcggggccgaacaactggctaaggtgggatatctccttgcccggttgcggcacatcgcccaagacgaggggttcgcggtcaatgagaaaaagacaagagtgctgcgtcagagcgcatctcagcaggttaccggggtggtcgttaatcagcggccaggcgttcctcgcgatgtagtgcgtagactccgggctatcctccatagagcacagttcgaggggcttcccgcccagaatcgtgaaaaccatccccactttgaggcctgggtacgtggcatggtcgcttacgtccagatggtgaacccagaccaggccagacctttgcgggaggccttagacgctctgccgggctaa

SEQ ID NO: 13749 - RNA, 1797 nt, synthetic construct
  source 1..1797: mol_type = other RNA
atgggcctgctgaattggattaagaagctagtgtctggaaagtcaccaggaaggccttccgggggccagagtgcaagcgacttagccagagaattcggacagaccattgaccctggtcttctggccggtcaggggtcacaaccccccgttaatcaaccacctaccgtgccccctcaacgccccactgtggtgaaagtgccggcaaactggatcagcacaggacaggctccttcctccgccactaacacacctaatagtgccgccgcctccaccatcccatacgcttcactggccttgagggctgctgttccacctgctcctgcaaatagactatcgccaagccccgctgagagtttcgattatgatctcgggccttttgcccccatctccgctgatgatctgcgcaccggagcagacagactgaaaaacaattggaacaatctgtggttgttcggccggtcaaaccggataccccctgctgatgacccccgtaccaaactcatagacagagccatgattaccgaggggcttctgacgcctcaggagctcgcagaaatccacgctgtgggccaggcatatgacgcagcccgcccagatctgcaggttgagctcgccaaggcgcaggtcgcagttactctcccagagcaggagagggccgaacgaaaagctagaaaacaagccgaagccgccgaaaggaagcgcaagcacgcagaggcggttgccctacgcaaacaggcggacatcatttttttgggccggggtgtgtccaatcagcttcacgatcgggtcagtgatgtggccaagctgaccgccattggacttccggccctgtctacccctgccgacgttgcagccgctatggacctcccagtctcgaggctgaggtggctggcgtatcacagcgatgcagccaccgtgtctcattatgtaaggtttactgtgccaaagcgctctggcggcacccgacaattagctgcgccgcacgattctctggcggaaacccagcagtggatcctggctaacgtcttatccagggtgccaacacacgacgcggcccatggtttcgtccctggaaggagcactgtaacgaacgccatgcctcatgtggggaaacccctcgtcatcaactgtgacctgagagactttttccccactatctccttcggacgggttcggggcatttttaagcagctcgggtacagcccagccgtagcaacgattttcgctctgctttgcactgaaagcccccgccaggaagtggtgtacgctggaaagacatttcacgttgctacaggcccccgagcgttgccacaaggtgcgtgtacatctcccgctgtcagtaacttggcatcaagacgccttgacagccgattggctggaatctgccgaaaactagggtttacatacaccagatatgctgacgacctgacattctctggcgacgctgcactcaacgataaggtcggctacctgttggctcgggtgaggcacatcgcagacgatgagggctttgcagtgaacgagaagaaaactcgggtgcagaggccgcacgtagcccagaaggtcacggggattgtggtgaacgatcgggccggggtcccgagagatgtagtgcgtcgtctgcgggccatacttcataaggccggtaaagagggcctggccgcccaaaatcgcgagaatattccccatttcgaggcatggttacgtggcatgatagcctacgttcatatggtcaatcccaaacaggcaaagccactcgccgaagcaatggggagaatcgctccaacaacaacttga

SEQ ID NO: 13750 - RNA, 1557 nt, synthetic construct
  source 1..1557: mol_type = other RNA
atgggattctttgactggctgatagagctgctcgtgggtggcccctcaaccgatcgcttttcgtctccccaacctcccccaaggaggcctccaggagccagacagtctagaagactggatctcgatatcgaacagttcacccctctgtctgactcagaagtcaagaagcaagcccggactctgggtcgggcttggagcaatccctggttcggacgcagggacttgatcccaccccccgaagacccgcgtactctgctgattgatagagcgatggtggggcatggcttgctcacaccggaggagctggtccgcatccacgaaattgggctggaaatggacaaagtacgtcctgatctggccatggctaaagtggaggctcaggcagccgttgccaggaccgttgaagaacggcgcgcgcgaaagctcgctagacagcaggaatccgcgcggctcaaaaaacttggtgcagaggctgtagcccagcgccgtgctaccgacattgtctacctcggccctggagtcagtaggggtctggcagaccgaagaagtaacgtggaaaagcttgccgctgcctcacttcctgtgttagcaagccctgccgacgtagcacaagcactgggcctggcagtccccagattgaggtggctcgccttccatagcgacgctgcgagcaggctgcattatgttcgctttactgtaccgaagaagagcggagggacccgcgagttgtcctctccacaccgtgccttagctgcggcacagcgctgggtccttacttccgtgctcgacaaggtgccaactctgcctgccgcccacgggttcgttaagggacgctccacagtgacaaatgcttccgtccatgttaaccgagccgtagtagtgaacctggatctggtggattttttccccagcatcacctttccacgggtcaggggcgtcttccaaagactgggttattcccccgccgctgccacagtgcttgccttactcgcaaccgaggcccctagacgaaccgtcgcttatgccgggaaaacatttcatgtcgctacggggccacgggctcttccacaaggagcctgcacgagtcctgccttgagcaatctggtggctcggggcctagacgcaaggctctctggcattgcggctaaactggggtttgcatacactcggtacgccgatgacctcacatttagtggcccagatgaggtgcagaatctagtggggtacttgatggcccgtgtgaggcacatagccggcgatgaaggcttcgctgtgaatgaggcgaaaactagggtgcagcggagaaacaccgcccagcaggtgacagggattgtggtgaaccaaaggccgaacgtgccacgaacggaggtgagacgcctgagagcaatcttgcaccgagctgcaaccgagggactagccgctcagaatcggcagaaccacccccggttcgcagagtgggttcagggaatggttgcatatatctcaatggttaatcccgctcagggcaagcctttggcagaggcccttgcccggttagatgctaagaaaggcccctga

SEQ ID NO: 13751 - RNA, 1557 nt, synthetic construct
  source 1..1557: mol_type = other RNA
atgggctttttcgattttctcagacgcctctttggcggaggggaagctggagatccaccaccccctctggcgtttcctgcaaaggctttaccacctaaaccagccccaccactgccccccaagaaaagagccccgcctacctcctatgaggcagactttctgccgattagtgacaaggagctgcacgccaaggcagcgacagaggaagtcagaacttctccctggtggggtcggactgatactattcctccggccgacgatgcgaggactaaactcattgacagggccctggtcaccagggggtatttgacccccgagcagctggaggagatccatcaggtaggtgatcttatgctgctgaaaaaaggagacgaagctatggtccggcaggaggcaaagagagccgttgaacggcggaaggaggagcgagctgctagaaaggctgagatgaagagattagcagaggaacgacgacgcgcccatgccgctgaagtcgctagtaggagagcgacagacatcctgtttctgggacgggacgtttctggcggactggctgaccgccgctcagatgtggagaaactcagaaccgcagggttgcctatcctagcgtcacccgcagaagtggccgcagcgatgggtctgactattcctcaactccggggaatggccttccacattgatgccgccaccgtgacacactacgtgactttccgtatccctaagaagtccggcggcatgcgcgatatcagcgctcccaaacctcgactggcaaccgcacagcgatggctgctagagaacgtgctctcaaaaatcccagtcgaacccccagcacatggattcctgaccggccgctctacagttaccaacgcagcccctcatgtgagacgagccgtggtggtcaacatggacctcaaggacttcttcccatctataactttcccccgtgtgcggggcatattcgagaaaatgggttacagtccggccgcaagcaccatttttgccctccttacaacggaagcacccaggcgggtggccgaatatgagggcaagagatactatgttgccattggccccaggggtttgccacaaggggcttgcagctccccagctctttccaatttggctgccggccgtcttgacagacgcttaggcggtctggccgcgaaactcgggtggacatacacaagatacgccgatgatttaaccttctcgggagacacgataatccccaaagggacgaaagatccgaagagcgtcgcctggttgctagctaggacacggcacatcatctccgaggaaagttttgaggtgaacgaaaagaagttgcgcgtacagcggcggaataccgcccaggtggtcactggcatagtggtaaatgacaagcccgctgttcctcgtgccgaaaggaggcgactgcgcgctgctcttcacagggccaggttcgtggggcttaaggagcctgcaagggttcgcggggaggtagcttacgtgagcatggtgaatgccgaacacggagggcggcttaaggtccgtctcgacgccctgctgaaacgctga

SEQ ID NO: 13752 - RNA, 1497 nt, synthetic construct
  source 1..1497: mol_type = other RNA
atggggttctttgactggctgcgaaatctacttttcggcggcatgccgcaaaagaaggcagtgatcgtgcggccagcccagccagtattccccctcagacccgcgccagcaagactacctgccgcagcaccaaaggctccaccccctgctcctcgtccaactgccgactatgcagccgaggatttcgcacctatctcagataaggagttgcggcagaagagcaagtcgagtgaagtagccaccagcccttggtgggggaggaccgatacgattccgcccggagatgacgcgcgcactaagctcattgatcgggccctggtgacccggggatatttaacccccgagcagcttgcggaaatccaccgcgtcggagacttgatgctccttaaaaaaggcgacgaggccattctgagggttcaggctcaagccgccgtagcgcgaagtaaggaagagcgtgccgctctgaaggccgaaaagaagaggcaggcagaggagcgcaaaaaagcacatgccgaggcagtagcacgacgcaaggccgctgacataatctttctcgggagaggagtctctgggggtttggccggccggacatctgacgaggggaaactacgcaagtttggattgccaagtctggcgacccctgatcaggtagccgcagcactgtctatcccgattctgaggctccgctggctggccttccactccgaagcttcaacagtgagccactacgtgcgctttcagattcccaaaaaaagtggcggcctccgtgatatctgggctccccagccaaaactggctgccgcacaggcttggatcctcgagaatatcttatctaaagtccccgccggccctgttgctcacggttttgtgccgggaaggtcaactgtcaccaacgcggctcctcatgtgaagcgcactattgtcgtgaacgtggacctgcgggattttttccccacaataacattccccagagtcagaggtctgtttgagtccctggggtatagccctgcggtggcaacagtttttgccctcctgtgcactgaagccccccgaagggaagtggaatactccgggagaaagtacttcgtcgccacaggaccaagagcccttccccaaggtgcttgtactagccctgcactgtcaaatctggctgcctggaccttagacaggcgactcggaggcgttgctgccaaattaggctggacgtacactagatatgctgacgatctgacattcagcggagacacccttgtgccaaagggcgagaagaaccctaaatccgttgggtggctgttggcaaggacgcggcatctgtgcgaggccgaaggttttgaagtgaatgagaagaaagtgcgcgtgcaaagacggaatgccgctcagacagttaccggcatagtcgtgaacgagaaaccatccacctctagggctgagcgtaggaaattgcgggctattcttcaccatgccagattcgaaggcatcgaaaagcagaaccggtga

SEQ ID NO: 13753 - RNA, 1611 nt, synthetic construct
  source 1..1611: mol_type = other RNA
atgctgctccgcctgctgcggtttttctttggtcttgtacggcccaaatctagtgctgagaggggtacccaccctggcgctctaccctctagcctgaccggtcgggacttaacccctcctcgcacggttcaatctgccactgcatcaaatcccgaaaccgggtcaagtagcccaggcccgtctgggttgaatgggttggacacagataagttcgcccctagcactgttgaggaggcatggaccgccacaggcagagcagattggcgctcagtattcttggatagccgcggggctattccccctagtgaggtgccaagggtccagaggattgataggaccatggtcggtatggggctcatctcagagagtgagcttgctgaaattcatgacattggcgaccgaatgagccaataccaaagtgacgcagcatttgtggccagcagcggcgaaagtgctgttgcgcagtcacgggaggagagaaggcgacagcgcgaagagaaacaagctgccgccgaagcaagaagaaaacagaggcgggagcaaatcgctcagaggcgggccaatgacatcgtctttctgggtcgaggcgtgtcccgtggattagccgaccgacgctccaacattgaacagcttcaggaacagtgcctgcccgtgctgtcttctccagcggatctggcacagtccatgggcatgtctattagcctgctgcggtggcttacctttcattccgatgcaccaactagggtccactacgtgtcctttgatgttccaaaaaagtcgggaggcatgagacggctatcggcgcctcacagaaagctggccgaagctcaacactgggtgttgactaacatactgaatctcctccccgtccatgcctgtgcccatggcttcgtcgctcgtcactcagttgtcacgaatgctgaactgcatgttggcgcttctgtggtgatcaacgccgaccttagcaacttcttcccagccattacattcgctcgggtggatggaatgttccagaaactgggttatagtccggccatcgcgacaatactcgcactcctgtgcactgagtgcccccgtcagccattacagttcggcgagacaatgtattacgccgcaaccggacctaggtccttgccgcagggagcctgtacatcccccgccatttctaaccagatcgcagggaagctcgaccgcagaatgtccctgctggccgaaaagctcgggtggcgctataccagatacgccgacgatttaacttggtccgtatgtggcgaggcgatcccatcaataggatatgtcctagccaggatacgtcacatcgtggaggacgaaggctttgagctcaatcatgctaagacaagagtgcagaggcgaagccagcagcagtccgtgacaggagtcgtggtgaacgatcgcatgaacgtgcctagacccacgatcagacgcatcagggcaattctgcataacgccaagcggactggactcgatgcccagaatcgaaatagccacccccactttagagactggctgaccgggatgatcgggtgggtgcacatggtaaaccctgagcaaggacgtcggcttatgagcgctttggcggaactgtcctga

SEQ ID NO: 13754 - RNA, 1611 nt, synthetic construct
  source 1..1611: mol_type = other RNA
atgctgatcaggctgctgaggttcctctttggctggagtaagcctgccgctcccgctgaagttgcatctccacgcgagccagctccctcctccttgaccggacgtgatctgtcccaaccagcaagcgtgcagagtgcaaccgtccctaaggcagatagcagggctgccgcccctcctagatctaacctgtctggcctcgacactgacaaattcgcacccattaccgtggacgaggcactagccgcgaccgctaaggcggactggaagagcgcgtattttgatagccgcggggtgatccctcacccatcccttccccgcgtacaagtcatcgaccggacaatggttggaatgggcctaatatcagaacaggagctggccgagatccacgacattggggatcgtatgggtcagtttagatccgacgccgagttcattgccattgcgggtgaacgagccgtcgtggaatcgagagaagagagacagcggcgcaaggagttgcggaaagcggaagccgaggcacgacgcaatttaagacgggaacaggtggttcagaggcgcgccacagacatcgtcttcctgggtaggggtgtttcaaggggattagcagatcgtagatcaaacgtggaactgctgcagaataacggactgcccgtgctttcaagtccagcggagctggcccaagctatgggagtgagtatcagcttgctccggtggcttgccttccattctgacgccccaacgagggtccattatgtgtcttttgatgtgcccaaaaaatccggcgggatccgaagactttctgctcctcatcgcaagctctccgtggcccaccattggatcctcaccaacattctgaatctgttgcctgtacacacgtgtgcacacgggtttgtggcccagcactcagtgttgactaatgctgagcctcatgtcgcagctagcgtagtaatcaatgcggacctgagcaacttctttccaactataacattcagtcgggtggatgggatgtttcgcaaactgggatattcgcccgctgtggcaaccattctggccctcctgtgcaccgagtgtccccgacaggcccttaagttctccgatactatctattacgccgctacagggccacgtgctttgccccaaggcgcttgcacctctcccgccataagtaaccaaatcgcagccaagttggatagacggatgagcgccatggcatctaaactcgactggaaatacactagatacgctgatgatctcacatggtcaaccacgggggaggttacaccgagcgtcggctacgtgctagcacgcatgcggcatattgtgaatgatgaaggctttgagcttaatcacgctaagacacgggtccagaggcgaagtcagcagcagtcagtgactggtgtagttgtcaacgacagaatgagcgtccctagacagactatccgccaggtgcgggccatactgcacaacgccaaaaggaccggattagacggccagaaccgagacgctcagccgcacttcagggactggcttacaggcatgattgggtggattcaaatggttaatccggaacagggcaggaagttacggtccgagctggccgagctctcctga

SEQ ID NO: 13755 - RNA, 1608 nt, synthetic construct
  source 1..1608: mol_type = other RNA
atgctcctgagactgctgcgttttcttttcggcatctcaccaccaacggcgccgcgagacgttcgttccagccttcaggaaagagacttgtcaggcgtccccgggtccactaaaagcactagcgggagtagtgcgactagcctaactacaggtgcaggacgttccgccccagcaggtctaagtggcttggatacggaccgctttcgacctcaaccgggaaccgatctgacatcactgggccggatgactgactggcagttctccgccgctgatactcgcaatctgataccctcagaagaatccccccaggtgcgggccatagaccgagctatggtgggcatgggactgattacagaaacagaactcgtcaggattcatgatatcggacggcagatggccccactgctctctgctgcctcttttatccagagcgccggggcctctgccgtgaaagagtctagggaggagcgccagcggcgaaaggcagagaagaaggagacagccaggctcaagcagatcgctcacttagaacaagtacagcacagaaaggcaaccgatatcgtattcctcgggagaggcgtttcccgcggtctagctgatagacgcgcaaatatcgagaagctgcaggatgccgggctgcccgtaatgtccagcccatctgacgttgccaacgctatgggacttaccgtctcccggctccgatggttggcattccacagcgaggcacctactagagtacactacgtgtccttcgagattccaaagaagtccgggggcacaagacgcctttcagctccccatagacagctcgctgccgctcaacattggattctgactagggtcctgaatttggtgcctgtgcacgagaacgcacacggttttatcactcagaggagtgtcgtgaccaatgccgtgccccatgtcaacagcagtattgtgattaacgcagaccttaaagacttcttcccctctataaccctggcaagggttgacggtttgttcaggtccctgggatactcaccggcggtcgcaaccatttttgcccttttatgcacggagtgtcctagacagaccgtccaaatgcacggcaccacctactttgccgctaccggacctcgtgcgttaccccagggcgcttgcaccagtcctgccatctctaatcgcatcacacacaaactggatcggcggatgagcgccatggctgccaagcttggctatcggtacacacgatatgccgacgatatcacctggtcgaccagcgatgaatcagccgtcgcagtgggctatgtgctggccagaattaggcacatagccgaagacgagggatttgagctgaatcatgcgaaaacaagggtgcaacgcaggtcgcagcagcagagtgttactggcgtggtggtgaacgatcagctgggtgttgctagggagacagtgcggaccataagagcgatcctccacaatgcagaacggacgggcctcgcttctcagaacaggaaccaacatcctcagttcgagagctggctgacagggatgattgggtggatctctatggtgaacccagaacaagggcaaaaattgcgccagcattttgacaaagttcggggaagctga

SEQ ID NO: 13756 - RNA, 1620 nt, synthetic construct
  source 1..1620: mol_type = other RNA
atgctcattaggttgcttaggttcctgatccgcttagcccttcctaccccccaaccacccagagacaccccctcatccctcgcaggccgagatctcagtggccaaccgggttctgctagccggacagtgtcttccgtcgccaacactactgtgtctagctccggccctgctgcccctaaaggttcctcgctttctggcctctccaccgacaaattcgctccaatgtccgtagctgacgccttgtcagccacagccgcggcagattggaggagtgccaacttcgattcgaggtccgttatcccacctgctgacctgccacgcattcaggtgatcgacaggaccatggtggggatggggcttatttcagaacaggaactggcagagatccacgacatcggcagggagatgacccagttccagagcgatgccgcattcatccatcaggcgggagagagggcagtggccatttcacgcgaggaaaggcagcgcctgaaggagcagaagaaggctgaggccgaacagcgtcgtgtgcttcggcgccagcaagtagcccatcgtcgagccactgacataatgtttctagggcggggcgtaagccgaggccttgctgatcggcgaagcaacatcgagaaactccaggctgggggactgcctctgttgagcagtccggcggacctagcaaacgccatggggttgacaattagtaaactgcgatggctggccttccactcagatgcgcctaccagagtccattatgtctctttcaacatacctaagaagagcggcggtacgcgcagattgtctgccccacaccagcaattagccgccgcccaacattggatcctcacaaacatcttgaatctaattcccgttcaccagaatgcacacggctttgtggcccagcatagtgtagtcactaatgccgctccacacgtcggctctagcgtggtgataaatgctgacctgaaggatttttttccctcgattaccctggcaagagtcgatgggctgtttcgaagaattgggtactccccagccattgcaacaatcctggctctgttgtgcactgagtgcccccgcgatactgttacattttgtggaaccacctatcacgcagctataggacctcgggcattacctcagggggcatgtactagccccgcgatttctaatctggtggcacataaactcgaccggcgtatgagcgctatggctgataagctcggatggcgctattcacgctacgccgatgaccttacgtggtctattgaagcggaaccatctccctcagtggggtacgttctggctaggataaggcatatcgtggacgatgagggatttagtgttaaccacgagaagacacgggtgcagagacggtcccagcagcaatccgttacgggcgtcgtggtcaacgaccggctgagtgtgagcagagacaccataagagagattagagcgatcctccataatgccaaatccacaggcctggccgcacagaatcggaatgagcacccgcacttcgaaagctggctggccggtatgatcggatggatcgacatggtgaacccccaacagggaggtaagctcagagctgaattaatcgaactgctgaggaaatga

SEQ ID NO: 13757 - RNA, 927 nt, synthetic construct
  source 1..927: mol_type = other RNA
atgggtgtggccatccccaaactgcgctggctggcctttcacagcgaagcaccaacgaggacccattacgtgtatttcaaagtccctaagaagtctggtggcgaacggcgacttgcagccccatataaacagctcgccgctgttcagaggtggatcctggatagcattctgaatcagttgccagtgcacgacgccgctcacggctttgtccgtgaaagatccactgtaacaaatgctgatctacatgtgggtgccgatgtggtcattaacgctgacctctgtgacttcttccccacaattaccttctatagggtcgaagggttgttccggagctttggctactccccagcagtggccactatcttggccttagtgtgcacggaatgcccccgcgacgcagttaccttttccggggagacatattatcctgcgactggacatagagggctaccccagggcgcgtgtactagtccggcaatctcatcgctgatatgcagaaacctggatgtaaggtttgctggcatcgccaatcgtatgcactggcgctacacacggtacgcggatgacctgacattctcaacctctactgagcatggagacaaaattgggtacttactggctcggattcgtcacatcagcgaggacgaggggtttagaattaacgccaagaagactcgagttcaacgcaaccacacacgccagagtgtgaccggaatcgtggtcaacgacaagaggtctattgataggaacaccatacggcgccttcgagcgatcctgcacaacgcaaagagaaccggattcgccgcccagaataccgagcaacgacctcatttcgagaattggctcaggggcatgatagcatacgttgctatggtgaatcctgagcggggacacgagctcagagagcagtacgaagctcttagatga

SEQ ID NO: 13758 - RNA, 1578 nt, synthetic construct
  source 1..1578: mol_type = other RNA
atggggctatttaactggctgtccaacctgctgggtaagtcccccgctggaaacaagtctagcgtagatcgcgggagtgtagtgattccggaactcagcgagccaaggccagagtctaaaaaacggggccctattcggctgaatggcttggacgcacagcagttcgcccccctcgaggataacgaagcacgggagctcgccaagagtctcggacgctccatctggaacgacaccttcttcgggaggagggacctgatcccaccaacctccgacgctcgcacattgttagtggatcgaatgatgattgccgatggtatcactacagccgacgaactagcagagattcatgcagtgggactggagatggataggctgaggccacaactcgcccatgccgctgccagagccgatagagcagtggcttcaaaccgccaggccagagccgaaagaaaggctcggaagaagtcagaagccgcggaccggttgcgtttacgggccgaagccatcgctgagcggaaactcaattctattgactttctggggcgtggagtctctagagggttgccccacaggcagagcgatgcgcagctgttggaacagcgtagtcttcccgtgctgcatacgccggctgatctggcacaggccatgcagttaacaatcagcgagttacggtggcttgcctttcacagcgaggccaccgagaggatacattatgtgcagtttgctattaggaagaaaagcggtggagtccgtctcctcgcatctccccatctcaaattgagaacaactcaccgctggatcctcgccaacatcctgtcaaagattccgctggacaacgctgcacacgggttcgtggtaggcaggggcatagtctcgaatgctcaaccccacgtggggaaatccgtggtggtcaatgtggacctggcggacttcttcccttcaatcaccttccctagagtcgcgggcctgtttcgaggcctaggttacagcggcgcagtcgccactattctgggcttgcttgtgacggaatgccctagacagcgagtgcggtatgcaggacgcgagctgtgggttgccagtggtcctagatctctgccacaaggagcctgtacatcccccgctatttcaaacgcaatcgcatggcgactggatcacaggctggctgcaatcgcctccaagctcgactggacttacacccgctacgcggacgacctgacctttagtactagcggcgacaatgctgagaagatcggctacttacttgccaggcttcgacacatatgtgaaaacgaaggcttcaggcttaatcataataaaacacgcgttcagagaagaaacatgcaacagtccgtaaccggggttgtggtcaatgaccggtgcggcgtctcgcgcaaggttgttcgacaattgcgcgccatactccataatgctaaacagaccggtctagcggcccagaatcgggatggacaccctgatttccaaaactggctgcagggaatgatcgcttatgtgcacatggttaatccagatcaggctctgccccttaagcagaaatttgagcagatcattgggccttga

SEQ ID NO: 13759 - RNA, 1602 nt, synthetic construct
  source 1..1602: mol_type = other RNA
atgggcatgtttgactggctgtcaggcttgtttgggcgagcctccagtgggaggcctacagcacccgctgcaggtgctgcatcacccgctccaccaccagtgagaagctctgccccagagcagcaaccccgtcctagacaatctgggccgaagcggctggagggtcttgatgctagccagtttgcacctctcgaaatcgatgatgctagggggcaagctaagcgcctcagcagatctttcgggagactcgtatggggcaaccgcactgatcggattccccccgccaacgatgcccgtactttgcttattgaccggatgatggtggcggaggggctggtgaccccagaagagctggcggacattcacagggtgggagctgagatggacagactccggcctgattacgatgcagcccatcgcgcgggtgctaaagccgcagagcaagctgctgcctcatcccggcaggaaagggagcagcggaaagccgagaaaaaagccgcagccgctgagcggaagagagaacgagccgagcagatcgccgaacgccggagaagtgacatagtctttcttggcagaggcgtttcacgcgggctggccgatcgtcagagttacccggatctgctgggatctttcggcctacctgtcatggcaacccccgctgacgtagtcaaggcaatgggcttcctcgacatagccgaactcaggtggctagcctttcacacagaggcagccactagaacccactacgtgcagtttactaccaggaagaagtctggcggagttagagtcctcgcctccccccatcagaagttgcgacgagcccaaggctgggtcctggagaatatcatcgccaaaattcgggtggacgacgcggcgcatggattcgtggcaggtcggagcacagtctcgaatgccacaccgcatgtcggccagcaggtggtagtgaacgctgaccttaaagacttcttcccttctataacgttctatcgggttgaaggatttttccgcaggctgggctactccggagctgttgctactattctggctctcttaacgaccgagtgtccaaggcagcaagtgacctatgccggccagactttatgggtagctaccggtcctcgctgcttacctcagggggcatgcacatcccccggtctgtccaacgccatcgcttggaaactggacaggcgattgggcggcatggcacgaggtctgggatggacatacacacgttatgcagacgacgtgaccttcagtgcctcgggagaacccgcggcaaaggtgggatggctgttggccagacttcgtcacctggcccaggaggaggggtttgaactgaaccataagaagactcgcgtgcagcggcagaatgcccaacagagcgtcaccgggttagttgtgaatgatagggttggagtcagcaggaaaacagtgaggcgcctgcgcgctatcctgcacaatgcgaagcagacggggcttgaagcccagaatagagataatcacccaaacttcaccggctgggtgcaaggcatgatcgcatatgtggccatggcgaacgccgagcagggagctagcctacaggcagcctttgatgaactctga

SEQ ID NO: 13760 - RNA, 1626 nt, synthetic construct
  source 1..1626: mol_type = other RNA
atggggctgtttgactggatttccaaccttttcggtggctccagctctacagcaaacccaccaaaacccgaatcgagcgactcagcaggtccccaaggccctgcttcaacatcatcttcctcaagtccggcacctaccccaccgcaacctccaaggcctggtccacctgctccccctaaaagtaaaaggttagagggcctggatgcatcccagttcgcacccatcgaggaagctgccgctctgcggcaggcgaaatcaatgcgcttaagattttggacctctacctggtttggcttgcgggatagaattccacccgcctctgacgaaaggactaaattggtcgaccgattaatggtcgccgatgggctggccacccctgaagagctcgctgagattcatgaggtcggcgccgagatggataggttacggcccgccctagatgatgccgccaaacaagccgggcaggcggtttccaggaataaggaagacagagccaaactcaaggcacagaagaaggccgaagctgcggaaagaaagcgactgagagcggacgctatagccgagcgtaagaggaatgacatagtgtttctgggccgcggagttagccgaggactagccgacagagagtccaatgcggagaagctggaaggaagggggcttccggtgctgcacaccccatctgagctcgcgacagctattgatcttcccctttccactctgcggtggctggcctatcacaacgaggcagccgagcaggtgcattatgtgcaattccaggtcagaaagaaaagtggagggatccgtgtcctagcttccccgcacaagaaaatgcgccgggcccagcagtggatcctcgacaatattctgactaagatagacatacacgaagccgcccacggatttgtggctggccggtcaaccgttactaacgcagcaatgcacgtgggacagcaggtagtggtcaatgtggacctgcaagatttcttcccctctgtgacctttcccagagtggaagggttcttccgaagcctggggtactccggcgcagtagctaccatcctcgctctcctggtcacggagagccctcgccaacgtgtgcgctacgctggaaaagaattgtgggttgctacagggcctaggtcgctgcctcaaggcgcttgcacgtctccagccctgagcaacgccatcagctggacaatggacacccgcctcactgctatctccagtaagcttggctggagctacagccgatacgcagacgatctcacgtttagtaccgctggcgaggccagtcagcaggttggctatctgttggctcgaattcgccatattactcaggaggagggattcggtctgaataggaagaaaacccgggtacaaaggcggagcgcgcagcagtcagtgactgggatcgttgtgaacgatagggccggagtagcacgtaagactgtgcggcagctcagagccatcctccataacgcaaagacaacaggtttggccgcacagaatcgcgaaggtcggcccgatttcgaagcatggttgcagggcatgatcgcctatgtgcgcatggtcaacccagagcaggccgcctctctgacagatgcatacgagcagcttagatactga

SEQ ID NO: 13761 - RNA, 1623 nt, synthetic construct
  source 1..1623: mol_type = other RNA
atgaattttttccgtcgacttaaacaatggtttgcccccggacaggaaaggagtgcccagcagacaccttcccaactgcctgcgtccgtggaaaatagggattacactagcccgagtcctggaaccccccctgcttctcagcccactactcccaatcggagcacctctccacctagcagcccccagcctagaccagaaagcacactgagcggcctggatgcttcacggttccaaccactgacccaagacgaggcgatggagagcacctctcaacctggctggaggactgcctactgggaccctctgaacgtcatcccgtctgcctcactccccaggatccgcgtgattgaccaaacaatggtaggcatgggactgatagatgccgaggagttggctgagattcacgacataggggaacagatggcccaatttaggacagattatcacgtgatccagcatgctggtcaagcagcagtgcaggccgcccgtaacgctagagatgctcgcaaggccgagatgaaaaggctggccgctgagcgtaagcagcagaggcaacaggccgtcgcacagagaaaagctacagatatcgtttttctcggccgcggtgtgtctagaggcctggcagacaggcgcagcaatatcgaaagactgcaggccagtgggctgcccgtgttgagctcaccagcagagctggctgaggcaattggcatcagcgttggtaccctccgctggctctcctaccaccatcctgcatctaaaaccacccactaccactcctggaagattgcgaagcggagtgggggcgagcggacaatctctcgcccacataaaaaactagaacacgctcagaggtgggtcctagaccatttacttagcaagctgccaacacatgacgcagctcatggctttgtgccaggtcggtcaacattgtctggcgccgttccccatgtaggcgcctcagtccttgtcaacgtggacctgcaggatttctttcccactattgatttcgcgcgggtggcaggactttttcggggcttcggttattccccggcagtggcaactattctcgcactgctgacgacagaagctcctcggcgcatgatccggtcggggtctgaaacccttcacgtggcggtggggaatagatcacttccccagggggcctgtacgtccccagcaatatccaatctgatctgccagcgaatggacaagcgattaagtgggatggcggcctccattggatggtgctacacgcgatatgccgacgatttgagtttctcctccgtcgaacaggccgacaaggtggcctacctgctcgccagagttcgtcactttactgacgaggagggtttccagatcaaagcctccaagaccagagtgttacgccggagtaaccagcagtcggttaccggaattgtcgttaacgataggccgagcatcgatcgaaaaaccataaggcagttgagagccatcctccaccgcgctaagtcagaagggctcgagcgccagaacagaattggccacacgaatttcagagggtgggtagctggaatgatcgcttatgtagagatggtgaacccacagcagggacggaagctacgagaagccttcggaactatttga

SEQ ID NO: 13762 - RNA, 1518 nt, synthetic construct
  source 1..1518: mol_type = other RNA
atgtctcccccttcagaatccggacaggctagcgagttttcaccagcggcgtcacggcccactactagctccccaagcccacctccggaatccgagctttctgggttggacgcctctcggtttcagcctattagtcacgacgacgccctcgaggcgacctctgatcctagctggaaaacagcatacttcgacccactaaacgtcatcccatcagtgtctctccccaggattcgggttatcgatcaaactatggtgggcatgggattgatcacagcagaggagctggccgagatccatgacgttggggagcagatgtctcaattccgcacggactattatgcaatacaggcggctggccagcaagccgtgcagtctagccgagatgcccaggctgccaggaaggctgaactgaaacgtctcgccgagcagagaaagcaggcccatgaagaggccgtcgctaagaggaaggcaaccgatattgtctttcttggacggggggtgtcaaagggcttggcagatcgacggtcaaatatagaacgtctgcaagcctgtaggctgcctttactgtcctcgccagccgatctggccgatgctttggacgtgtccatcggcacgctgaggtggctggcatttcaccaccccgctagtcgaaccacccattatcattggtggaagattcagaagtcttccggcggtgaaagaacaatctgctgtccgcatagcaaacttgcaaatgcacagcggtggatactcaacaacattctggggaaagtgcccctccacgacgcagctcacgggttcgtaccttcccgctccacactgacgggtgcaaaaccacacataggaagtagagtcctggtcaatgttgacttgaaagattttttccctaccatagatttcgcaagggtggctgggctgtttcgagggctaggatactcccccgcggtagccactatcctggctttattgacaactgagagcccgcgcatgagactccgatcaggaaaaacaaccctctacgtagccgtgggtaaccggtctttacctcaaggcgcttgcaccagtcccgccatcagcaatctcattagcagaaggatggacaagcgtcttttcggtatcgccaactcaattggctggaggtatacacgctacgccgacgacctgagtttcagttgcagtgatagggaagataaagtggcttatttactcgctcgcgtgagacacgtcaccagcgaggagggctttcagattaaggaatctaaaaccagagttctgagaaagaatagccagcagagtgttactggaattatcgtcaacgacaaagcttccattgatcgcaagactatccgcaagctgcgctccatcctgcatcgggccaaattcgaaggcctggagaagcaaaatcggctaggacaccccaatttcagcgcctggctcgccggcatgatcgcatacgtggaaatggtgaaccccgaacaggggaacaagcttagacttgcctacgagtcgctgggttga

SEQ ID NO: 13763 - RNA, 1605 nt, synthetic construct
  source 1..1605: mol_type = other RNA
atgaacttctttcgaagactgaccaaatggattacatccgggcgcgacagctcagccgatcaaccagtgccttcacagatgccggcctcggtggagaatagggactatacagtccctaatacgcctcagaccccttccgcacccgcaagtaatccaagcccaccagaacagccacagactagcaacctcgccggtctggatgcttctcgttttcagcccctgagtcaggacgaagccttagatgcaacatcccagcctgggtggcaatccgcttactgggaccccctcaacgtaattcccagcacatcactgcctagaatccgcgtcatcgatcagactatggtgggtatggggctgatcgacgcggaggaactcgccgacattcatcatattggcgaggaaatggctaagtaccgaaccgactaccacgtcatccagcatgcgggacacgccgctgttcaggctgccagagacgctcgggctgccagaaaggccgaaatgaagcaaagggccgcacagcgaaaacaggagcgcgaggccgcaatagccgaacgtaaggcaacagacatcgtgtttctgggtcgcggagtcagtcggggactcgcagataggcgttcaaacgtcgagcggttgcaggctagctctcttcccgtgctgtccagcccggcagatctagcccaggccatggggatccccgtggcaacactgagatggctcagttaccaccatcccgcatcgaaaaccacccactatcactcatggcagatagccaagcgaagtgggggcgttcggacaatctccaggccccataagaatctggaggatgcgcagcgctggatcttggaatctatcctcgctaagttaccgacccatgacgcggctcacggctttgtccccggacgttctacactgaccggagccaccccacacgtcggagctaaggtgcttgtgaacgtggacctgcaggactttttccctacgatcgatttcgcacgggtggccggtctgtttcgcggattcgggtacagcccagcggttgctaccatcctggccctgctaactactgagagccctcggagggttataagatccggcagcgagacgctgcacgttgccgtaggaaatagaagcttgccccaaggcgcatgcaccagtcctgcgatatcaaacctgattgctaggcggctggataagaggctcgccggcatggcccgatctattgagtggcagtataccagatatgccgatgacttatctttctcatgtcgcgagagcgaagagaaggtggcttacttgatggcaagggtaaggcatctcacttctgaggagggcttccttgtgaaagaatccaaaactcgcgtgttgagacgccacgcacagcagtccgttactgggattgtagtgaatgatcggccatctatcgatagaaaaacgatccgacagcttcggtctattcttcacaaagccaagtccgaaggcctagaaaggcaaaaccggattggtcatacaaatttcagtggctgggtcactggcatgattgcctacgtggaaatggtgaacccacaacaagggcaaaaactcagggaggcttatgaggctctttga

SEQ ID NO: 13764 - RNA, 1668 nt, synthetic construct
  source 1..1668: mol_type = other RNA
atgggcctgttcgaaatccttaagcagattttcgcacctggccaaagacggccaggaccacctaggggagctcctagtgaccccagcgctattgatcctggcagcctcacacccccaaggcaagcagagccctctccagccaccagctcagctccactgtcaagtgccactcccgctacaacgcctgcgcctgctgccacaagcaaacctgccggtggactagaagggcttgatgcttccaggtttcaacccctcacaccctcagaggcactggatgccaccgcacagcccggatggcaaaccgcttactgggacccactgaacgtaatcccatctacccacttacctcggattagggttatcgaccagactatggtcggtatgggactgattgatgcagatgaacttgcggagatacacgacatcggccagcgaatgtcgaagtttcgcaccgattaccatgtcatcgccgacgcaggacagcaggccgttgatcaaagccaggctgcccgggatgcacggaaacaggagatgaagaaacgagccgccgagcgcaaacaggctcatcaacaggctgtggcacacaggaaggccacagacatcgtgtttctcgggagaggcgtgtccaaaggtcttgccgatcgccgcagcaatatcgagcgtctcgccgcgtctgacctacccctgctgtctactccggcagacctcgctaatactctggggataagcatcggcaccttgaggtggctgagtttccatcatccggcttctaagaccacccattatcaccactggaaagtccctaagcggagcggcggggagagaactatatcccgaccacagaaaaagctcgagagtgcacaacgctggatactagaatcaatcttagctaagcgacccacccacgacgccgcccatggatttgtcacgcagcgtagtaccttaactggcgccctgccccatgttggatcacaggtcgtggtcaatatggacctggagaacttctttccaacaattgatttcgcccgggtggctggtttgttcagagctatgggctattcacccgcagtagccacgattatgtccctgctgtgcacagagtctccgagaagggtgatcagatccggggacgagacactgcacgtcgccattggtaaccgatccgtgcctcagggagcgtgtacctctcccgcactgagcaatttgatatgcaagcgcttggataaccggttggtgggcatggcggaaagtattgggtggaggtatacgcggtacgcagacgatctctccttttcatgtccaatcgccaaggacggtacagaccagggcgcgcaggcttctgccaagattggctatctgttgagcagggtacgccacttcgccgacgaagaggggttccgagtgaaagaatccaagacacgcgtgctgaagagatccactagacagtccgttactgggatcgtggttaacgacaggccttcgattgatcgtaagaccatccggcggctcagagctattcttcaccgcgccaaacacgaggggcttgaagcccagaatagagaaggacatccaaactttgccgcatggttagccggcatgatcgcatacgtgcagatggtgaatccggcgcaggggcaaaaactccgtaaacagatggatctgctgtga

SEQ ID NO: 13765 - RNA, 1629 nt, synthetic construct
  source 1..1629: mol_type = other RNA
atggggttatttcgcgtcctcaagcaattctttgctccaggaaggaacccgcctcaggacgcgaccagagcacaagcgacagcccccagcagcatcgatcacagagacttgactccaccaactacaccggtcgttacgaccgggcctgactacgttccactgaactccctgcccgccacaccacccagagagtcatcagggttcgacggcctcgacgctagccagttccagcccctcacccaggacgaagccatggaggcgacagcagaacctgggtggcgcactgcatactgggaccccttgggggtcattccgtccgcagatctgccacgaattcgtgtgattgaccagacgatggtcgggatgggcctaatagacgccgaagaactggctcagatccattccttaggggaagagatgtccagatttcggaccgattactacgccgtacaagatgcgggcaaccaggccgttcagcagacaagagacgcccgcacagcccgtaaagccgagatgaagcagcgagctgctgagcggaaaaaacaacacgacgctgacgtggcccatcgcaaagctactgatatcgtgttcctaggtcgcggcgtctctagaggacttgcagaccgcagatccaatatcgagcgtcttaagagctccgaactgccagtactctcgtcccccgccgatgtggctagtgccttaggaatttcagtgggtaccttgaggtggctagcttttcatcaccctgccagcaagacaactcactatcatacttggacgatcgccaaaaggtccggcggcgatcggacgatttctcgaccccagaagaagcttgcagcggcgcaacagtggattctggatagcttgctgagtcaaattcctgttcatgatgctgcccacggtttcgtcccgggacggtctaccctgactggtgcacagccccacgtgggttcccagatagttgttaatatggacctgcaggatttttttcctactatcgatttcgcaagggtcgctggactcttcagggccttaggctactctcctgccgtcgccaccatctttgctctgctgtgcacagagagccctcgccgggtgatcagaagtggcggagagactctccatgcagccgtgggcaaccgaagtcttccccagggagcatgtacatcaccagccctgtctaacctcatcgcaaagaggctcgataagcgtctggctggaaccgcaaaatctattggatggcagtacaccaggtatgccgacgacctcaccctgagtacaaaggtgaactcgagtaaagtgggatatgtactggctcgcgtacgccacttggccaaagaagagggttttgtggtgaaggaatctaagacaagggtgctgcggcagtgcacccagcaatcagtgaccgggattgtggtgaatgatcggcccagcatcgatagaaaaaccatccgagaaatccgggcaatactgcaccgggccaagttcgagggcttggagaagcagaatagaatcgatcacccaaacttcgctgggtgggtcagcggcatgattgcctatataaatatggtgaatcctcagcagggcggcaaacttaggcggcaacttgacgagctgtcaatgaggtga

SEQ ID NO: 13766 - RNA, 1635 nt, synthetic construct
  source 1..1635: mol_type = other RNA
atgggcttattcgatttctttaaacagatgttcggcggaaggagtgtccaggagaagtgcgtcagatgtcgccaaccactccggatgggtgccctgttctgcggaaattgcaagcacccacgaggtgcgccttaccccattccacttgcgcagaccaaacgatcagaccagggtgcagccaacgctcccagggttagaccccagaatctggtcgggctcgatgctgacaagttcaaaccaatgacaacgtccgaggcaatggccacaatcgacaacgaagacagctttaaaagtgcctacctggatagcctgaacgccattcctgatgctagccttccacgaatacaggtgattgatcgcactatggtcggcctagggctgatcgctccagaggaactggtgcacatccatgacgttggcaaggccatgggcgagcttcgtggcgactggtcttccatccatgcaagaggccagcaagccgttcaactgtcacgagaagagagagcggccagaaagcaacagaagatcgaagaggccgctcgtaggaggcaggcaagggcagaagcaattgctcggaggaaagccactgatatagtcttcctcggccggggagtatcaagagggctggctgataggcgggccaacgtggaagcactgaagcgtgccggcctccctgtattggcagcacctagcgacgtctccgtcgctatgaacatctccatcccgaggctgaagtttctggcattccattccgacgcgccggagcgcgtgcattacgtgagtttttctgtgccgaagaaatctgggggcatgcggcttctgagcgctccacaccagagcatggatgaggcccaacgctggatactcgacaatgttctgtgtaaaattcctactcactctgctgcgcatggttttgtcactggatgtagtaccgtgaccaatgccgaaccccacgttggcgccagaaccttggtgaacgtggacctcaaggatttttttccctcaattacttttcctagggttatgggcctattccagtcgctgggatattcgcctgcagtggcaaccatcttcgctttgctgtgcacagaggcccctcgccgcgtgatgaagtatgctggtagagtgttccatgctgccacagggcccagatcattgccacaaggagcctgtacctctcccgcaattagcaatttagtggctcgggggattgatcggcgtctggaaggtatagcccggagacttgactggacatacacacgctatgccgacgatctctctttttccaggaaggatgccggcgagcctcacgtagggtacctcttggcccggatccgccatatcgcccaggacgaggggttcgaagtgaatgagaagaagactcgggtacagcgtcccaaccagagacagaccgtgacgggactagtggttaatgataaagtgaacgtgtcccgaaaagacattcgccggatccgcgctattctccacagggcaaaacacgagggattagcgaggcagaaccgggaagaccacccctattttgagtcctggcttagaggaatgatcgcgtacatcagcatggtaaatcccaccgtcgggcagagtatgcgaacgcagttcgacgctctggcctga

SEQ ID NO: 13767 - RNA, 1635 nt, synthetic construct
  source 1..1635: mol_type = other RNA
atgggcctatggaacgtgctagcacgactctttggcgggggctccgcttccactaatcccacacccccaactcaaccccaggacgctagggccccagtcggaatgccttatggccgggggagtgcagtaaacacacctcctcctccaccgcggacacttgctagaccgggttctccctcacctactcggccagcacctacaaacctgaatctggatccaggccaatttgcccctgtgggggctgccgagctcaaaaagagggcaggagagctcagatggaattgggcaagcgtgaacttcgatcgccgcgatcagatccccagtgccggtgatcctcgcactgccctcatcgaccgtgccctggttgcccaaggccttctgactcccgaacagctggttgaaatacacgagactggtgcccagatggcagagctcaggcccgagctgaggaatctgcagaacattgctgctgacgctgcactcgccgacgaagctgaaagaagagcgcgcaaagaggcaaaaaaggccgaagccgatcggaggcgtgcagaaagggcggaggcaattaaacagcgaagagccacagatatcgtgtttctggggcgtggcgtcagcggtggactagcagatcgccgggctaacatagagagactgcaagcgctcgggctccccgttttggctaccccagccgatgtcgcaaaggccctggggttagaagtctccagactcagatggctggctttccattctgaggcagccgctgtaacccactacgtgcgattccagatccctaaaaaatctggaggaacccgcgaacttgctgccccccatcgcgatcttgcacggtgccaggaatgggtacggatccagatcctcgaccgcgtggatttgcacgacgccgcgcatgggtttgtgactggcaggggaaccttgacgaacgcccgcccacacttaggcagggctgctgttgtgaatgccgatcttaaggacttcttcccaaccattacatttcctcgggtgaagggagtcttccagcagttgggctattctcctgccagcgcgactgtgctggccttgttgtgcacggagtgtccaaggggagtggtgaattatgacggccgggagttacatgtggccaccggtccccggggattaccacaaggggcgtgtaccagtccggcgctctccaacttggtggctcgaggtcttgacaataggttgtcggccttcgctcgaaggctgggctggacttacacccgatacgctgacgacctgaccttctcagctgatggagaagcgatggggcagacagcaagactgctgacaggtctgaggcacattgttggagacgaaagcttcgtggtgaacgagaagaagacgcgggtacagaggcccaagacaagacagacagttacgggcattgtcgtcaatagacacccaaacgtcccccgcgacaccgtacgtcggttacgtgccatcctgcacagagccaaaaccgagggcctgaccgcacagaatcgggaggcccacccccattttgaaggctgggtgcgcgggatgatagcctacgtcgccatggttaacccggagcgagggagagagcttctggccgagtttgaactgagaaagaggtga

SEQ ID NO: 13768 - RNA, 1635 nt, synthetic construct
  source 1..1635: mol_type = other RNA
atgggactcttcagtaccttgttccgatggctgcgaggtggccccaccttagacgaagcccgaagagccgccgccagaagggttcctgctgatcgggcacctgaaggccagccctacagggctgccgttcctggtgcaggggctagaccaccagtgttgccgtccgcacaacccagttctaggcctgccgccggaaaactaaacctggatgcaggccagttcactcccctcagtcctgaggaagtcaaaaagagggccgcctctctctcctggaactggtcaacagtgaatttcgaccgtcgggatcagattccctctacggccgagcccagaactgccttgattgaccgagctttggtggcccaaggcctgctgacgccagagcagctggtgcagattcatgaagttggcgcccagatggcagctctgaggcctgaactggctaacatacacaccatcgcccacaacgctgtagctgcggacgcagctgaaaggcgcctgcgtaaagagcgcaagcaggcggaagccgcacaacgaagaactgctcgggctactgctgtggcgcatcgcaaggctacagatattgtcttcttagggcggggcgtatcaggcgggttggcagatcgcagagccaacatcgaacgtttacagctgctcggcctgccggttttgggtccaccaggcgatctagctcaagcactggggcttgaggtgagcagactgcggtggctcgcgtttcattctgaggccagcgctgtgtcccactacgtgcggtttcgaatccccaaaaagagcggaggtacccgtgaactagcagccccccatcgagatctagcccgctgccaagactggatcaggcgcaacatccttgacagagtgcctctgcacgaggcagcgcatggatttgtgactaaacggaataccctgtcgaatgcgacacctcacgtccacagggccgtagtcgttaacgccgatctgaaggacttttttccatccatcacgttcccacgcataaagggcgtgttccagcagcttggatactccccggctgctgctactgtgctcgcacttttatgtaccgagtgtcctcggacagccgtaaagtatgaggagagggaactctgggtggccacaggacctagaggactcccccagggagcctgcacttcacccgctctcagcaatctggtagcgaggggcctggacggaagaatcgcaggtctggcccgcaagctcggttggacatatacccgctacgcggacgatctgacctttagtactgacgctgagggcgccccaaaaacagcctggctgctggcaagactcaggcacattgtgggggaggagaacttccttgtgaacgagaagaaaacaagggtccagcggccaaacacccaacagagcgtgaccgggattgtcgtcaatcagcatcccaatgtgccccgggaaaccgttcggcgtctgagagcaatactgcacagggccaagacagagggcttggcagcacagaatagggaagcacacccacattttgccggatgggtcagagggatgattgcctatatccaggtcgttaatccggagcgcgggcgcgaacttttagccgacttcgaggctcttcctcaggggcggtga

SEQ ID NO: 13769 - RNA, 1656 nt, synthetic construct
  source 1..1656: mol_type = other RNA
atgattcccctgggggctattgccggcgccttagtggttctcctcaggcagctcttcaaagggtctaaaccacagccgaggagatcgtctccccctcctcctgtaccacgtccaggtgaccggccttatacacccggtgcacctccacctattcccccagcggcaggagctgctagacctgcacaacctagtccacctaggtcagcaccaccccgatccaccactctgaatctggacgccggccagtttacacccgtttccgccgaggaagcaaaaaagcaagcccgcgggatcaagtggaactgggcctctgtgaactacgataggagggaccaaatccccgcgcctactcagcctcgcactttgctgatagatcgcgcaatggtggcccagggactgctaactcctgagcagttggtggagatacacgatgtcggcgccaaaatggctgaactgcggccggatctcgccgggatcggtaatgtggccgatcatgccgtggccgctgatcaggaggaacggagacggcgcaaagagcagaagatcgcggagagcgcagagcgccaacgcaagcacgctgaagccgtggcgcaaagaagggccactgacattatcttccttggacgtggcgtatccggcggactcgcagataggcgcgctaatgtggagaagcttcagcagttgaacctacccgtcctcgctacctcaggggatgtagcgaaggttctggacttagaaatcagccgactgaggtggctggccttccatagcgaggcttgtgccgtgacgcattatgtgcgcttcaccatacccaagaagagtgggggaacccgagaactggccgcacctcacagagaaatggcccggtgccagctgtggattaagttaaacatcctggaccgcatcccccttcatgaagctgctcacggctttgttgctcacagaggcacgatgagtaatgcagtgccccatgtgcgtcgggacgtggtcgtgaacgccgacctgaagaattttttccctaccattacctttcccagagttaaggggatcttccaggaactgggctacagccccgccgtagctaccatactggcactcctctgcaccgaatgcccgaggcagcgggtcacttatgctggacgagagttgcacgtggcgacaggaccaagagctcttccacaaggagcctgtacctcaccggccctgagcaaccttgccgcaagagggctggatgcacggctaacaggcttagccaggaagctcggctgggattatacccggtacgctgacgacttgacattttccacgtccggggcacccgcacagaaaacggcgtggattctcgcccggcttaggcacattgcacaggaggaaaatttcactgtgaacgagacaaagacacgggttcagaggccatctgcccagcagaccgtgacaggaatcgtcgtcaataagcgaccaaatgtcccacgtgagactgttagacgcctgcgtgctattttgcacagagcgaaaacagagggcctggccgcacagaaccgagagcagcatccccacttcgctgcctgggtcggtggtatgatcgcctacatgcaaatggtcaacccggagagaggcaaaaaacttaaagctgaatttgacgctctgccaaaatga

SEQ ID NO: 13770 - RNA, 1215 nt, synthetic construct
  source 1..1215: mol_type = other RNA
ccatcgcgacaggcgatccaggctaaacagcaggcggaagcgcaagccgccgaacaagcgttggccgatgatgacgccgcaagagctgctgctcgggaggctaggaaagccgctgcagctgccagacgagagcagagagctgccgcaattgccgaaaggcgccggaccgatattgtttttctgggtaggggagtctctgggggattggccgaccgacgcgctaacgtggagaggcttaccgccttcggcttgccggttctagcaagccccgccgatattgcccgcgtgttggggatctctgtgccccgtctgagatggctggccttccatagcgaggcctcctcagtgagtcactacattcgttttacaatcgccaagaagtctggaggcatccgcgagctggctgctcctcatagggacatggcagctgcacagcagtggatcctgacaaatattcttaacgtacctcccgtgcgcgattgcgcacacgggttcgttcggggacggaacgtaatgactaatgctgtgccacatgtccggagggacgccgtggtgaatgccgacctcaaggatttttttcctactgtcacctttccgcgcgtcaaaggtatattcgagagcttaggctactctcccgcagcagccacagtcctggcattactgtgcacggatagtccacgaaggctagtcgagtacgaaggcgaaaaacttcacaccgccgctggtcctcgagctctgccacaaggcgcctgcacaagcccagctctgagcaacatggccgccagaaaactcgatgcaaggttagaggggctggccagagctacaggatggacctatacccgctatgccgacgacctgactttttccgcaaacggcgaaactgcgagtcggtgtggtgggctgctccaagcgttgcggaggctttgtgccgaagagggcttcaccgtgaacgagaagaagacgcgggtgcagcgtcccaactcccagcagtcagttacgggggtggtcgttaatcaaagaccaaatgtgcctaggacccttagacggcggctccgtgccatactccaccaggcacgcacaactggactggctgcacagaatactgagaatcaccccaacttccccatgtggctcagaggcatgatcgcgtgggtatcctcaacaaatcctgacgagggccgcagactcctggaagcattcaaggacctgaagtga

SEQ ID NO: 13771 - RNA, 1587 nt, synthetic construct
  source 1..1587: mol_type = other RNA
atgggctttatcgactggttacgggacctttttctggggccagaattccgcccaaaggataggtcacaaccgcccccgcaaagaccgggtgcagttcctgatcccgtgtttccgccccggaatgtcgctattcctggacagaatcccctagcacaaagacctgcccccgctccaagaacaccccctcctcctccacgaaaactcaatctgaccgcggctgcctttgccccaatttcagacgcagaggccaaaaagcagggggaggccgccaggtccgcatttaacccctggtggggacggcgcgatcttatacctccacccgacgatcccaggaccctcgtgatcgatagatctatggtggcacacggctttattactccgcaggagctgacaggcatccacgatgtggggagacagatggaagaactgcgccctgatttgaaccaggtagaagctcaggcaaaccaagctgtcctcgccgcccaggctgacagagaggagctgaagaagcgcaaaaaggcagaggcagccgaaaaaaagcgccggcatgccgaggacgttcttaggcgccgtagcacggacattgtattcctgggacgaggggtttcaaaaggtctgtctgatcggagagcaaatgtggagaaactccaggcggccggtttaccagtcctggccacacctgctgacgtagcgcgagcactaggcctcacagtgcctcgtctccggtggctggcgttccacacggaagctagccctgtgacccattatgtccggtttgagatacctaaaaagtctgggggaatgcgcgctttggctgctccccacagggacatggctcggtgccagcagtggattctggcgaatatactggggaaggtggcgccacatgccgtagcccatggtttcgtgaagggtcggtccaccttgacaaatgccgctccccactgcaggcgtgacgttgtcgtgaacgccgatctgagggatttctttccaaccatcacgttcccccgggtgttgggaatctttgcccagttagggtacagcccagccgctgcaacagttctcgccctccttgccaccgaaagccccagacgcccagtcgaagtcgacggcaccacataccacgtggcctgtggaccccgtgctctaccacagggggcctgtacttcccctgcactgagtaaccttgcagcacgaggcctggacaggcggttagcagctatcgcaactaagctgggttggatctattcgcgctatgccgacgatctgactttcagtaccagtggcgaggccaagaccggctacttgttggccaggctgagacacatcgcgagggacgagggcttcactgtgaacgaagataagacccgggtgcagagacgatctgacgcccaatccgtcactggcattgtggttaacgagttccccagcacaccacgtaaggagcgcagaagactcagggccgcaatgcataaagcgaagacttccggactggcccctaaagatcttgctagggcccgaggcatggctgcctacgtcgctatggtgaatccagctcagggagccaaattcgctgcactgagatga

SEQ ID NO: 13772 - RNA, 1590 nt, synthetic construct
  source 1..1590: mol_type = other RNA
atgggtctactgtctttgatccgccgacttctgggcagggatcagccctctcaaccaccacctataccacggccgtcgacttccccacggcacaacgtggtgccgcaggtcagagcaaccagtcagccccctcaacgaaaaactctgagccagctggatagccaggttttcgcagggttgagcggtgccgaaacgaaacaacaggccaaagctatggggcgacccttatggagtaacttattcgcctttggccgccaaagcgtgatccctccagtttccgatgagcgtaccctgatgattgaccgtgccatggtaggggaggggctgatcacacctgaagagctcactgcaatccacgagattggcctgaagatggaggagctcagaccctcctacgaaggtgctaggcatcagggtcaggtagcagtgaacgcggacaaggccgccaaggctgagcttaaaagacagaaaaaggctgaggccgccacacggaaagcagaaagagaggcagccattgctcagcgaaaggccaccgatatcatttttctgggacggggagtgtccggcggtttagcagaccggcgatcccacgtggagaaattgcaggaggccaaactgccggtgttgtccactcctgcggaactcgccaccgctctcgagttgcccgtaaaaagactaaggtggctggctttccacgccgaagtcgctgtggtcacccattatattcgctttcaaatccccaagaagagtgggggcatgagggagatctcgacaccacataccgatctcgctcgggcgcagagctggattctccagaatatactcgaacatgtgcccgtgtctggcgtcgctcacggctttgtgcgggagcgtggcaccctgacaaacgcgagaagccacaccggcaaggatgtcgttctgaacgctgacctcaaggacttcttcccatcaattacgttccctagagttcggggaatattccagcagctggggtacagccctgctgtggccacagtgcttgccttactgtgcactgaatgcccaaggaggactgttacctacgatggccagacctatcacgtagccaatggtctgcgcgctctgccccaaggcgcatgtacatcacctgcactctcaaatctttgcgcccgcaagctcgaccttcgctttgccgccctggctgcgaagcatgggtggacatacacgagatatgcagacgacctgacattctcaacaaggggagagcccgcaaaagccactgccttgatcctctctagattgcataatattgtccaggacgaacactttgaagtgaacaccgcaaagactaggatccaacgccgcaatgctcagcaatctgtcacaggaatcgtcgttaatgatcggtgtaacgtggacaggaagaccagacgtcggctgagggccatacttcatcaggccgaaaaaacggggcttcctgcacagaaccgcatcggacacgacaattttgcgggatgggtgagtggaatgctagggtatgtcaagatgattaatccccagcagggcatgaagcttttcaaagcttgggatctgctgggaggccagaagtga

SEQ ID NO: 13773 - RNA, 1587 nt, synthetic construct
  source 1..1587: mol_type = other RNA
atggggcttttttcatttattaagagcctctttggcgggtccagtacgccacctccactccctaggagagaaaccaccccggtacggaacgctgtgccgcaagccaaaaccccacctcagccccccaaaaggcagactttagcccatctagactcacaggtgttcgaagccatatcctctgaagccgcaaagaagcaggcaaaagcgatgggtcgccctctatggagcaatctctttgcattcgggagacagagcgtgatccctcccgtaactgacccaagaacactgatgatcgatcgggctatggttggtgagggcttaatcactcccgaggagctgacacagattcatgagataggtgaaaagatggccgaactgcggcccgatttcaactgggcaagacaccagggccaggctgctgtgaatgccgataaagcagccaaagctgagctgaaaaggcagaagaaagccgaagccgctaagcggaaagccgacagagaggcagcaatagcccatcgcaaggcttctgacatcatcttcttaggccgcggggtcagcggaggcttagcagatcgccggtcccacgttgaaaaactgcaggaagcgaagttgccggtcctttccacaccagccgaggtcgctactgcccttgagctccctgtcaaacgccttaggtggctggcattccatgcggaggtcgccgtggtcacacactacatccgttttcagattcctaaaaagtctggcggggtacgagagcttgctgcacctcacgctgacttggcgagggctcaacgttggatactccaaaacattctcgagcgagtgcccgtgtctggagttgcccacggtttcgtgaaaggaaggggaacccttaccaatgcgcgaagccacaccgggaaggacgtcgtgttgaacgccgatttgaaagacttctttccttcaattaccctgccgcgcgtgcggggaatttttcaacagctggggtatagtccatcggttgccacagtgttggctctcatctgcaccgagtgtcccagacgcacggtggagtacgacggccagacgttccatgttgcaacaggcccacgagcactgccccaaggtgcgtgtacatcacccgccctgtctaacctgtgcgctcgcaagctggatctgcgttttgccgcactcgcggctaagcacggctggacatacactcggtatgcagacgatctgaccttctccaccgacgatgaagccgctaaggccactgcactaatcctgagtcgactgcatcacatcgtgaaagacgaacatttcgaggttaacgaggccaagacccggatccagagacggaatgctcagcagagtgtaactggagtcgtggtgaatgatcattgcaacgtgcctagaaagactagaaggcagctgagggccattctgcaccaagccgccaagacgagcattccagctcaaaatcgtattggacacgacaactttacaggatgggtgtccgggatgctgggttatgtcaagatgatcaatccacagcagggcgaaaaactcttcaaggcctgggatatgttgggcgagaagaggccctga

SEQ ID NO: 13774 - RNA, 1599 nt, synthetic construct
  source 1..1599: mol_type = other RNA
atgtttagatggctcctcaatttcctggggctggctccaaatccacgacccacggccaggcagcggacaatcgctgactcatggacagccgaaaggacgtccgccgctcctcagtctacacccgctcggtccgttagcgcccaaaagaagcaaactagtgctagccccgaggcactgaatgcggcgcagttcacccccattggcgatagagatcttaaagagcaggcaaaaaacttaggctcagcctggtccaacccgtggttcggaagaagagacatcatcccccctgctgatgacccccgcacacagctcatagacagggctatggtcacacacggtttcttgacgcgggaagagctagccgatatacatgccgtgggcgaggagatgagtgagtaccgacccgatacggtgctagtgagtcacagggccaatcaactggtagctgaagccaccgccgatcgggaggaactcaagcgccagaagaaggcagaagcggaggagaggaaacgccagcgagaggaggaaattgctgagcgcaaacggaccgacatcgtttttctgggcagaggggtgagtaaggggctggcagatcgtagagccaacgtggaagagctgcagaaaaacaacctcccagtcctggcaactcctggcgagcttgctaaggcaatggaattccctataccacggctcagatggctggcatttcacactgtggctgcagaacgggtacactacatttccttcactgtgccaaagaagtctggaggagaacgcgtgctttcagctccgcaccgtgacatggcagctgcacagcgatggatactcgagaatattctggaggcggtgcctgtacatgaagccgcgcatgggttcgtcaggaaaagatccacagtaactaacgcagaaccacacgttggacaggaaatgttagtggggtgtgaccttgaggacttttttccctcgatcaccgtgtttcgcgtgatgggcgtgttcgaacagttgggatattctcccgctgtggccacaatcctggcattgctgtgcacagagtgtccccggcggaaaatgatctacgccggccagaccttttatgccgccactgggccgagggccttaccacaaggagcctgcacctctccagcgctgagcaatttggtctgcaggcgactagacagccgcctcaccggtcttgcaaagcaattcggcgcaaattatacccgttacgcggatgacctgacatttagcggttccggggacgttgccaatatggccggctgggtgattgccaaaattaggcatgtcgtcgctgatgagggcttcaccttgaacagaaagaaaacccgggtccagcggcctaatatgaggcagaccgtgaccggtgtcgtcgttaacgaacgacctggtgttccaaggaagttggtacgtcgcctgagagccatcctccataatgcccagactactggactggccgcacagaacagagaaaaccaccctcactttgagtcttgggtggaggggatggttagctatatccagatggtgaacccgtcacaaggagagcctcttcgcgctgccctggctacaattcgcaactga

SEQ ID NO: 13775 - RNA, 1524 nt, synthetic construct
  source 1..1524: mol_type = other RNA
atgccgattggagttcagccggaaagcagcggagatgaacggtcggctccagcgccgactaggagaagggagaatctggcggcactgaacgccgaacagtttgcccctctcgaacatgacgaggtgcgggagcaggcggaccagttaggcagtctttgggggaacccttggtttggacgccgagacttaattcctcccgcaagcgatccacgcacccagctcatagatcgagcaatggtgggccagggcttgctcacccccgaagacctcgtggacattcacagaattggagatgctatggacgccgtgcggcctgatctagccttggcggttgcagaagcggatagggccgttacgagatcagccgaagagagggccgccctgaaagctgaaaagaaagcagcggccgcagagagacgcagactccatgcagagcaagtaactcatcgtagggccaccgacatagtctttctcggacgcggggtcagtaagggcctggctgagaggacacccaatgtggccgctcttcaacaggccggtctaccaatccttgccacacccgctgatgtggctgcagctttatccatctctatcccacgcctgcgatggctggccttccatagcgtcgctacgaagaggacccactacgtaagctttaccgtccccaaacggtcagggggtgtgaggactctttcttccccacacagatccttggcacagtgccaagaatggatactgcggaacattctggaccgtattccagtgcacgcagcagctcatgggttcgtgaggggccgttctactctgtccggcgccagaccacacgttggagctgaggtggtgctgaatgtcgatttgaaggatttcttccctacaatcacattcccacgcgttaaaggcgtgtttcagcagctcgggtattcacccgccgccgcaacaatcctagctctgctctgcacagagtgtccacgcagaccagtggagtacgccggcgagaagctgtacgtggctactggagagcgcggactgcctcagggcgcatgtacctccccggcacttagtaatctggtcgtgaggcgaatggacgcccgtctgcaggggattgcccagagattaggctggatctacacaaggtatgccgacgatatgacgctgtctactagtggtgacgccgcacagcggttggcctatgtgatggctcgggtacggcacatcgcgggtgatgaggggttcgcccttcacgcagaaaagactagagttcagcgacctaacgtccggcaatgcgtcaccgggatcgtggtaaacgagcgtgccggtgtacctcgagaaaccgtgcggcgcattcgggccatcctccatagagctcggcacgagggcctggctgctcagaatctggacgggatcccccattttgaaggatggctgagaggaatgatagcttatatccgcatggttaacccccgccaaggcgctcctttgcaacacgccttcgacgagctcatgccccccggtaccgtcaggtga

SEQ ID NO: 13776 - RNA, 1290 nt, synthetic construct
  source 1..1290: mol_type = other RNA
atgagtgtttgggactcattgcggagactgattgctccaccaaagttgccaaaaacaagtgaggccgatagacacgccatggccgagagctttaaccttcacagaaagaggcccctgcccgcggttcgactgaaagaacagctggatctgagctggttggccagaagacgcactgctcccgcagcggagccgtttggttacctcggagacggcgtgagctatgaactgggtcagcgagtgaccgacgtggagagactgagcagtgctgggctcccggtgcttaaaacgccggaacagctggcagaagccattggcttttctgcccggcgccttcgctggttggcttaccatagggatgcccaggctagttgtcactacatacatttcatcgtggagaagaagtccggcggagtacgatccattgccgcgcccaggcctcaaatcgcagcctgttgcagatggatcgaccgcgaaatcctacggcttattcctccacacgatgcagctcatggatttgtgcttggacggtccacgacaactgccgcccagcctcatgtcgggcaagacgtcatagtgaacatggacctgtctgactttttccccacgatcaccttccccagggtacggggttggttcgcatccctcgggtattctcgacagacagcgaccgtcctagccttgctgtgtactgaaagcccacggacccctatcgacatggacacatcaaatgttaatgcctcctctatagacactgtcaatcactcacgtctgtggctcgctaccgggcccagacagctacctcagggggcatgcacttctcctgccatcagcaacctcgtctgccgaagcatggacaggcgcttaaccgggctgtgcgaaaaactcggctggacctatacaaggtacgcagatgatttatcattctccaccagtggcaaagatgattcgcagattgggtacttaatgcaccgcgtcggcggaatcgtgcgggatgagaggtttgctatcaacgattctaaaactcgggtgcaacgccgctccggacgtcaaaccgtgaccggtctggttgtgaacgatcgtataggggtgcctagggagacagtaagacagcttagatcaattctgcatcacgcaaagactgagggcctggaggcccaaaatcgtgaaggccacgctgacttcctcggctgggtcacaggaatgattggatatgttggtttcgtggacccagctaagggcgagaggctgcggagccagctggatcaggtactcaagcaggagacaacctga

SEQ ID NO: 13777 - RNA, 1227 nt, synthetic construct
  source 1..1227: mol_type = other RNA
atgtgggacagactcaagagactctttagtggcagcgctaagagcccaagacgaagtgccgcccagtttaacacacggcggggtaaccaatccgacgagcgagttcttccttactggtcacagcgtactccactggccgattccgctgaagcccgcttttcttatcttggaaacggggtcagtcacgaggcagcagatctggccaccgacgccgagctgctcaagaaactggagttaccagtggtcgagactggaaatcagctcgctgaggccatcggcttctcgccgaagaggcttaagaggttggcggtacattctgctcagactcgctcttgcaactatttctattttaccgtgcccaagagatctggcggtgagcggctgcttgcagcaccacgacctcagatcgacgcctgttgccggtggatattacgcgaaatcctggacaagatctcaatacaccctgccgcccacggctttgccaaaggaaagtctataaaatccaatgcggaaattcacacccaacagcaggtgatcgttaatctggatctcctggatttcttccccgctattgagttccgccgggttaggggcctgttcgagagcctcggatacaatgggcaaattgccactctgctagctttgctcaccacagaggcatctcgggaacccgtcccgtcaccagccggaacactatgggctgcgaccggccctaggcatttaccccaaggggcatgctccagccccagcatttccaaccttatctgtagggctctggacaggaggctgagcggcctgtgtagatcattgtcctggaactactcccgctatgcggacgatctaacatttagcgcatccgccgtggcaggacagagggtaggctacatgctgcaccgtattcggggcattgtacgagaagagggattccaggtcaacgaatcaaaaacaagagtgcagcgaccttcgcaagctcagacggttacggggctggtcgtgaatgacggtgtttctgtgagccggagtaccgtgagaatgttgcgcgccatcctccacaacgcttcattgcatgggctcgaaagccaaaatcgcgataaccatcctcacttcgcagcctggctggagggtatgatcgggcatgtggtcaatgtggatccccagcacggggtgaaacttcagagacagtttcgtcagctgaaaaagcagcaggtgagtcacaatcatgaatga

SEQ ID NO: 13778 - RNA, 966 nt, synthetic construct
  source 1..966: mol_type = other RNA
ctcccagtgctggctactcctgccgatgttgcacggtggctggacctctccatcccacgcctgcgatggctggccttccatagcgactccacaaccgttagccattacgtcttctttacagtcccaaaaaagactggcggcgtacggagacttagtgctccccatgctggaatggctgcggcacagagaaagatcttccaggagatactccctcgtcttcgcatacacgatgctgcccacggctttgtcacgggccggagtatcagatcaaacgccactccgcacgtgggagcccatgtggtggtgaaccttgacctcaaggacttctttcccagcatcacttttccgcgtatccgaggtttactcactgctgcgggctactctccttgcgcgtcatcgattctggcgctgctatgctccgaatccccccggcaagtactaggtctggggggtcaaaggctgttcgttgcaaccggaccacgcgctttgccccagggagcatgtacatctcctgggttggccaatttggcagcccgcatactggatgctcgacttgccggcttagtcgccgcctggggatggacatatacaagatacgctgatgatctgactttttctacccagaacgcccaagcagacatcggcaggttgttaaccgctgtgaggaatattgtggcagacgagggtttcacggtgaatgaggagaaaacccaggttcagcgccgaagccaggcacaggaggtgacagggctggtcgtaaaccagcgggccaaagcaccacgtgaactcattaggaggattcgggccatcctgcacagagctgaaagagaagggctcgccgcccaaaatagggagggccaccgggattttgcagcctggctggggggaatgattgcttatattgccatgaccgaccccgctaccgcagccagatatagggcgcagctggaacgcgtgcctaggtga

SEQ ID NO: 13779 - RNA, 1809 nt, synthetic construct
  source 1..1809: mol_type = other RNA
atgctgttgagtagccggctgttctttcctttagacgtgagctctcagaagtactttttctacttaccagaattcagggagtgggtggtcatgtcatttttcgactggctgcaaaaattgtttggttccgccagtcctgaagagcagcggcccataccaccccgtaagagtccagaagaccctaacccagttgcgacgccggaacctcaacctagccccaccactgaaacattgaagccatctaaggttgccgaccccccagctcgcgtctctaagactgctcgggccgtgaaaatcacagagcaagaagaaccccccaaaccacccgtttcgagcgtgtctggggacgcacttgctatgggggagctggcgccactctccctggatgaagctaaaagcgaggctaaggcgagcaatatttcctggcgtatgtccgggggctgggataggagggatcggatcccctccctggagaaccctcggactagcctgatcgatcgagctatgatcggccacggccttattactgccgaggaactggaggagattcatcgcgtaggggcagagatggatgagctgaggccactcagggaacacgcccttgagctggccagacagcaggtggctgctgaggaacaggacaaacagaagatcaaagaggagaagaaaaaggaagccgctcgcagagctgccgtgagacaagcagaaatagagctcgcaaaaaaaacagatattgtctacctgggtcggggagtctctcaaggcctagcaaacaggcagagcaaccgagagcagcttgaccagttgcagcttcctttcctggatcacccggacgagctcgcaaaaatcctcgaagttgaaatccctcaactgagatggcttacatttcataatgaggccgccgaacggacacactacctgcagtttgaaattcccaagaagtcaggaggctcgagaattctcagcgcccctcaccaggccctctcaaaaactcagcagtgggtattgacaaatatcctccaaaaattacccacccatgaagctgcccatggcttcgtccctggaagatctaccgtgactcacgccaaccttcacgtgggatgtgacctggtcgcccaaatggacctggcggatttctttccctccatcaccttcccgagagtgcgcgggcttttcgagagttttggttattcaccggcaattgctacaatactggctctcctgtgcaccgaggctccaaggcgcaccattgagctatctggcaagaggtattatgtggcggaaggcccccgcagtctaccacaaggggcttgcacctcacctgcactatccaacctgatcgccagaaagctggatgcccgactgaccggtatgtctcagaagattggctggacgtactcccggtatgccgacgacctgaccttctcatggaaaggctccgccggtgagaatggaaaacagcccaactatggatacctgctctcacaggtgctcgcgataatcgatgaggagacattcgccttgaatgaacagaagactagaatacagaggccgagccagcgtcagcaagtcacgggcatcgtggtaaatgaccggccaggagtaccccgcccagttgttcgacgcttacgagccattttgcaccaggcacagaagaccgggttagcagcacagaatagggagaatcatccccattttgccggttgggtgcaaggaatgatcgcatacatcagtatggtgcagcctgagaaggggaagcagctccaggccgcatttgagcaggtccctaaggacgatgctgtgaactga

SEQ ID NO: 13780 - RNA, 1692 nt, synthetic construct
  source 1..1692: mol_type = other RNA
atgggcctgtgggataaggtgaagactctcctgggactcggcgatggagcacagcaaccaggtgccggagaagatgctggagggggtcaagggtcctctccagcagcccctgctcaacccgcaaggccagctgctgctcaaggcagtgctaagcctgcagcagcccaaccccctgcagcagtgcagcagtttagcgctgctcctgcccctgcagctgcacagaggcctgctaaacagcgccagaagcccacagatccttacgacgctaaaggcattctggggctcagcgcagacgaggtgagaaagagagccctcaaaatcaacccatataagactgcgtggatcggcagggtcgataccattccaccccagtctgacgaaaggactgccctcatcgatcgcggactcatcctgcgcggcctgctgactgaggctcagattgctgaaattcacagggtcggcgacatttggcttaagcaccacgaggctgccagactggcgggaacagtagccgccaagaccgccgagaaggcaattgccgacatcaagcgcgagaaagaggccaggaaagccgagaaaaagcgtctggctgccgagcgtagagagagacgagcggccgaaattgcccggaggagagccgaggacatcatatacctcggccgcggagttagtgccggactagcggacaggagggctcacgtggaggctttagaggaacgggggctccctgttttgtccacacccggggatgtggccagagctcttggtctgactatctcacaactgcggtggctggccttccatggggatgccgtcgaacgcccgcattacgtttattttgaagtgccaaagcggtcagggggcaaacgactcctgagctcccctcatcggtccttagccgcagcccaggcatggatactgcacgacatcctggaaaggcttcccgtggaagcccccgcacatgggttcgtccagggcagatctacggttactaacgcccgaccccacattggacgcgatgtggtagtgaatttggacctgtcagacttttttcccaccatcacattcccaagggtgagaggggtgtttcagcggcttggatacagcccagctgccgcgaccgtgttagccttgctatgcacggagcccccacgtcgggaactagagtatgacgggcagcgctactgggtagcagtcggcgaacgtggcttaccccagggtgcatgcacatctcccgccctgtcgaaccaggtagcgaggaagctcgatcggagacttgccgggatgtgtaaaaaacacgggttcgagtacacccgctatgccgacgatcttaccttcagtgccccgcctggtaagagagcggagataccgatgcttttggcgcgagtgcggcacatcgtcacagaggagggattcgcgatcaatcctaaaaagggccggattcaacgagccgccggtcgacaggaagttaccggcatcgttgtgaatgataagctgggtatgccacgtgaagaagtccgccgactgcgggctatcttgcatgctgccaagaaaaccggattggcagcacagaacagggagggcctgccagactttgaggcccatattcggggcaaactcgcttatctgcagatgatagaccgccagagagcagctccgcttttggccgctctggacgcgctggcaggttga

SEQ ID NO: 13781 - RNA, 1626 nt, synthetic construct
  source 1..1626: mol_type = other RNA
atgggcttctgggacaagttgaagtccatgctaggcctaggcggcgccgaacaaggggaaagatcccctggtggagtggaagccgaacaggcgcaaggagcccaagcaggacctgctgcagctacacaaccggctgcacgggccggtcaacccagagtagctgcaggggccaaaccaaggccagctgatccttacgatgccggaggcattctcgggctgagcgccgatgaattgcgccggagagctttgaaaattaacccctatcagaccgcctggatcggccgcgtggacacaatccctccccagagcgatgagagaacagcccttatcgaccgcggcctggtcctaagggggcttctgacagaggcccagttggcggagatccaccgggttggggatctgtggctccgccataaagacgccgcagccttagccggaaccgttgctgctcgcagcgccgatgaggccatagagcgacttaagcgcgagaagctggcgcgaaaagaggagaaaaggaggcagtccgccgagagaaagcggcagagagcagaggctgtagccagacgcagggccgaagatatcctgttcctcggcaccgatgtatcagcagggctggccgacagacggtcacatgtcgaatctctggctcagagaggcctgccagtgctgtcaaccccagctgacctggcagctgctctcggtgttgccgtaccccggcttcgttggctgtgctttcatggcgaggccgttgaacggccacactacgtctattttgacgtgcccaagcgatctggcggtaccaggcagttggcagctccccacgcaagtcttgcagcagcccaggcctgggtattgagggaaattctcgagaaactgcccgtggaggctccggcccatgggtttgtcaaggggaggagtaccgttactaacgcccgcccccatactagacgggacgtggtcgtgaatctggacttaagcgacttcttccccacaattacttttccaagagtgaggggcgtcttccaccgactcggctacagccctgcagtggccacgctcctggctctgttatgtacggaggcgcctcggcgacctgtggagtatgacggtcagcgctactgggtcgctgttggagacagggccctgcctcaaggggcatgtacatctccagcactatctaaccagatcgcgcgtaagttggatagacggttagcaggaatgtgcgcgcgcgccggtttcacttatacccggtacgctgacgatctcactttctccgcgcctccaggaaagcgcggagatatcgctatgctgcttgcgcgcgtgcgtcacatcgtcgaagaagagggctttgccattaatccggataaaggacggattcagcgagcgggcggcagacaagtggtcactggggtggtggttaatgacaagcccagtgcaccaagggaggaagtgcggaggctccgagcaatactgcacgctgccaagaaaacgggactcgcagcccagaacaggtcgggtgtgccggactttgaggcccaccttaggggaagaatagcctacgtgcagatgattgatcgtgaacgtgctgcccctctgctggctgctctcgacgcactgaccgggtga

SEQ ID NO: 13782 - RNA, 1704 nt, synthetic construct
  source 1..1704: mol_type = other RNA
atgtcattttggaacaagattaagtccctgctaggtgtgggagctaatgacgagccagccggcgagaagcagagggatgagcccgcagacggtggcgatggacaaagagcccgtactaaacccgttgtgacggcgtcctcttcagtggctgcgaaattttctggggcaagtacaccgagtccacccgcccgaaaacccgctactacccctacgcggccaaaaactaccgccaccaaacagccagctaaagccgcccctccaaactcacctccgacgacaggggtcttgttggggctctccaaggacgagctgaggcagagagcactgaaaatagacccctaccgcactgcctggataggccgggtcgacactattcccccccagtctgatgaacggacagcgttaatagatcgcgggctgattctgcgcggactgctgtctgaagagcagattcaggaaattcaccgcgtgggagatttgtggctacggcatcacgacgctctgagactggcaaccagcaaggccgctaagaccgtggagctcgccttcgagcaaatgaagcgcgaacgtgctgagcgcaaggtacagaagcaacgtgaggccgccgaacgaagacgacggagggtggaagacgttgctcggagaagagccgaagacatcatctttttaggcagcggagtgagctcccgcctggtagacaggcgatcccatatcgaagctctcaccgagcgagggcttcctctcttgagcacgcccgccgatgtggctagagcactggggatctcagtgcctcgccttaggtggctgtgttaccacggcgacgccgtcgaaaggccccactacgtctacttcgaggtccccaagagatctgggggaaagagattgctcagtgctcctcatgcgagccttgcgcaggcacagacctggattctgcgttccatcctcgataagctgccgaccgagaatcctgcccatggattcgtggcaggcaggagcaccgtcacaaatgcccgggagcacctgggtagggatatcgttgtcaaccttgatctgcgagatttctttcccaccataacattccctcgcgccagaggcgtgttccagcgagttgggtattcaccagcggtagctactatcctcgccttactttgcacagagtgtcctcggagagaagtggactatgacggccaaagatactgggttgccattggcgataggggtctaccgcaaggcgcatgcacatctcccgcgctgagtaatcaggtcgcccggaaattggataggaggctcgccggcatggcagctaaacacggttggacttatactcgctacgctgacgacctcaccttctcggcaccaccaggcaaacggagcgggatcccaatgctgctcgctcgtgtccggcatattgtgacagaggaaggctttacattacacccttccaaagggagaatccagcgcgcagcacggcgacaggaagtgacaggaatcgtggtgaacgataagctcagtgtgcctcgggacgagcttagaaggctgagggcaatcctgcacgccgcaaagactaccggtcttgaggcccagaaccgggagcagaggcctgactttgaggcacatattaggggaaagatcgcctatgtagccatggttgacccagaaaaagccgctccactgcgcgccgctcttgatgctttgccccgttga

SEQ ID NO: 13783 - RNA, 1686 nt, synthetic construct
  source 1..1686: mol_type = other RNA
atgagcttctgggacagggtgaaagcattctttggtgggggcaaaggggagggcactgaagcgccaccatacgatgcaccaactcagagagcccccgcacagagggctgccactaaaggcacaagtggatcaggcaccaaagccagtcaaggcgccgcgactagtacctcacctgcagctagtggagctcctgctgcgagccgccgtaccttcgtaaagtggataacagaggctttctctacagatcccgctgtgaccacacgggccatcatgagcatgtcggctgccgagatcagacgcagagcattgacaataaatccatttcggaccgcctggattgggagagtggacgttatcccacctcagtctgatgaacggaccgccctgattgacaggagcctgattctgctcgggctcctgacagaggagcaaatcgtcgaaattcatcgcgtcggcgacctttggctgaagcatagggaagcgtcccggctggttgcattgtccgcagcccggaatgctgagcaggcccttgcggacctgaaacgggagcgagctgctaggaaagagcagaagcgaagagatgctgtggagaggcgtcggaagagagccgaagcaatagcccgcaggcgggcagaggatatcgtgtatctgggggcaggagtctccgctggcctagctgaccggcgatcacacattgaagccctggcagccagggggctccctcttttagcttctcccgccgacgttgccaaagccctgggagtcagcatctcccgtctccgctggttatgctttcacagcgacgccgtagagcgcccccactatgtgtacttcgagatccccaaacgctctggtggaaagaggctgctggcggctcctcatgcatcattggagcgagcccaacactggatcttgagagagattctcgacaagctccctgtggaaccgcccgcccatggttttgtgaagggcagatccactgtaaccaacgcacgcccgcacgtgggaagagatttggtagtcaacctggatttgagcgactttttccctacgattacgttccccagagtgaggggcgtgttccgtcgcctgggatacagcccagcagtcgctacagtgctggcccttctgtgtactgaaccgccaaggcggccagttgagtatgaggggcaacgaacctgggtggcagtcggggaaaggggtttaccccagggcgccagtacatctcccgccctatccaatcaggtggcacgaaagttggacaggcggcttaccggaatggcagaaaagcacggttggacctacaccagatatgcggacgatctcactttttccgcccctgagggaagaagaggcgatctcgccatgctgatggcccgcgttcgccacatagttactgaagaaggctttgcactcaacccccgtaaggggagagtacagagagcctctggccgccaggaagtgacaggcattgtggttaacgataagcttggggtccctcgggatgaggtgcggaggcttagggccatcctgcacgctgctaaagctacgggactggaggctcagaatcgggaaaagattccacatttcgaagcctacctccgaggtaaaatcgcctacgtcgccatgatcgacccggcgaaggctgctcctctgcatgctgcgttagaggccctatcacgatga

SEQ ID NO: 13784 - RNA, 1722 nt, synthetic construct
  source 1..1722: mol_type = other RNA
atgggattttgggacaaagtgaaatctttcataggaacaggcaagcccggcgaaggtgagccaggaaagaacgagccagacgataaaccaaaggcagcctccgccagtacaacaagctcatccagttcgagctctacgaagtccacaacgaccggtgcagctaccggctctgcgaccacagctgttgcaacctttactagcactagccccgcgccagctgccaaaaaaaaagacaagcctaagccgaaagacccatacgatacatctggcatactgggtctgagcgccgacgagatgcgaaagcgggcgttgaagatcaatccttatcagactgcttggatcggcagagtcgatacaatccctcctcagtccgacgagaggacggccttgattgaccgcggactgatcctgcgcggtctgctcaccgaagcacagattgaggagattcacagggtcggggacctttggctgaagcataatgaagcaactagcttagcatctactgtcgcccggaaaaaggctgacgaagctatcgaagagttgcggcgacaaaaggcagagcgcaaggccgaaaaaaaaagactggctgccgaaagaaaaaagaaacacgcggaagccgttgccaagcgtcgtgccgaggacattatattcctgggacggggagtcagtggatccctgggtgaccgcagagccaacgtggaatcattgcagaagcagggcttgcccctgctttcgacccctgccgaagtagccaaggcgctgggactacctatacccaggctccgctggttgtgctatcataacgatgctgtggagaagcctcattatgtgtactttgaggtccccaaacgttctggtgggatgcggcttctgagcgctccgcacgaagcactatccaaagcacaacagtggattctccagaatgtgctggcaaagttaagcatcgaagctgaggcccacgggttcgtcaagggcagatccaccgttacaaatgctcgcgctcatctcggccggggtatcgtggtgaatcttgatctgtcagatttctttcccaccatcaccttcgggagagtccgcgggttgttcgaatcaatcgggtacagtccggctgtggcaactatattcgccctcctctgtacagagtcccccagaagaaaggtcgtgtacgatggcactacttactgggtggccgttggtgagaggggactgccacagggggcatgcacatctcccgcaatctcaaatctcgtagcccgaaaactcgataggaggctgaccggcatgacgcggaaaatgggctggacatacaccaggtatgccgacgaccttacctttagtgctgcaaacgaagtggtggacgatgggaaggggggccaaaaaaaggggcggggcgatctgggcattctactcgcccgagtgagacacattgttcaagaagaggggttcgccatcaacccaaagaagggacgtgttcagcacgccggaggacggcaagaagtaaccggcatcgtggtgaacgataaactcggcatgcctagggaggaggtgaggaagctgcgagccatcttacacgcggctaagaaaactgggcttgcggctcagaatcgcgagaacattccacattttgaggcctacctgcagggcaagattgcctatctgaacatggtagatcctgagagagcaatgcagttagctaaagcctttcttgagattcccaggtga

SEQ ID NO: 13785 - RNA, 1701 nt, synthetic construct
  source 1..1701: mol_type = other RNA
atgggcttttgggataaggtcaagacctttattggtcctgggaagcctggcgagggagaaccgaagaaagatgatcctgctccagcggcaaaacctgcctccactcctgctaccaccagtacgtctgcatcaggaaaaaccgcttcagcttccagcgccgtaggagccgtgtctacgtttaccgcctctactcctgcaaagaccgccgctgccaaaccgaagaaagacaagcctaaggacccatatgacgcctcaggaatcctcgggctgagcgccgacgaattacgtaagcgagccctgaagattgaccccttcagaactgcatggatcggccgcgtggatactatcccaccccagtctgacgagagaacagctctgattgaccgaggtctgatcttaagaggcctgctgtcggaggagcaaatcgaggaaattcatcgggtgggggacctgtggttgaaacaccatgaggccgctaacctcgcctcgacagttgcccgcaagagagcggatgaggcaattgctgagctgaagaaagagaaggctgccaaaaaagcggagaagaaaaggctggccgctgaacgcaagaagaaaagggccgcagacgtagcacggaggaaagcggaggacattatcttcctggggcggggagtctccggcaaactagctgatcgccgcgctaatgtcgaagcactccagaaaaacggtctgccaatactcagtacccccgccgaagtggccaagacactgggattgccgatagggaaacttcgatggctttgccatcacaatgatgctgttactcggccacactacgtgtacttcgaagtgccaaagagatccggaggaacgagacttttgagcgcaccccacgagaatctcgctaaggcccaggagtggatcttcaacaacatcttgcaaaagcttcccacagaaaaccctgcacacggattcgtgaagggcaggagcacagtcaccaatgctaaagagcacgtgggtcagggcatcgtcattaacctggatctaagcgatttctttcccactattggattcggcagagtgagggggctctttgagtccctcggctattctcccgccgtagccactatcttcgctttgttgtgcaccgaacccccccggagaaaagttacgtacgatggtactctgtattgggttgccgtgggagatagggggcttccacagggcgcttgtacctccccagccataagcaatctggtgagtcgcaagcttgaccgacggctgttgggcatgacacgcaagatgggctggacatataccaggtacgcagacgacctgacattctcagccgagatgcaggaaatcgagggcgggaagaagggaaggaaagacctcgggatgctgctggcacgtataaggcacattgtccaggaggaagggtttgcgataaatccgaagaaaggtcgtctccaacatgccggcggccggcaagaagtcacaggcatcgttgtgaacgataagttaagcatgccccgggaggaggtacgacggcttagagccattctgcatcaggcgaaaaaaaccgggctggaagcccagaataaggagaaacgcccacactttgaaagttacctcaaggggaaaatcgcatacttaaacatggtggatcctgacagggcaatgcagctagcgaaggcatatatggaagctggtggtcgttga

SEQ ID NO: 13786 - RNA, 1707 nt, synthetic construct
  source 1..1707: mol_type = other RNA
atgggcttttgggacaaagttaagactttcctagggaacgagaagcccggagagggcgagcctaagaaagatgatgcccctcccgcagtgaaaggaccggccactcccgcttcatctggaggcgcaaaacccgctcagagcgccaagaatgcagccgcgcctcctcctgtggctacatttactactactcaaccagtgattacacccgccccagcaccagcaacaggtgccaagaaaggcaagccaaaagacccatatgatgcatccggaatcctcggcctgagcgcggaggaactcagaaagagggcactgaagattaatccctacaaaaccgcttggattggacgagtcgataccatcccaccccaatctgacgaacggacagccatcatcgacaggggcctgatcctcagagggcttctctccgaggcccagatagcagagatccaccgtattggggacctttggttacgccaccgcgaagtgacatcgttagcggagagtgtggcaaaacagaaggcaagcgaggtgatcgaagagctgaggcgtcagaaggcggagaggaaggccgaaaaaaaacgcctcgctgctgaacgaaagcagaaacgtgccgaggaaattgctcgccggagggccgaagacatcatttacctgggtaggggtgtttctgccggcctcggagatagacggtcacatatcgaggccctgggtgagcgcggtctgcctttgcttagcacacccgcagatgtcgctaaagccttgcagatccctgttccccggttaagatggctgtgcttccactctgaagctgtcgagaagccccattacgtatatttcgaggtaccgaagagaagcggaggaactcgcctgttgagcgctccccatgaagccctggcgaaggctcaacagtggattcttcacaatatactggagaagctgcccgtggaggaccctgctcacgggttcgtgaagggccgaagtaccgtaacgaatgccagaccacatctgggccagcaggtggtcgtgaacctggacctctcagatttttttcctacggtcacctttcttagggtgcgaggctttttcgaaaagatcgggtatagtccagccgtggccaccatatttgccctgctctgcacagaacctcccagacggcgcgtagtgtacgatgggcagccgtattgggtggcagttggaacccgcggactgcctcaaggggcctgtaccagtccagcaatttccaatggggtgtctaggaaactagacaggaggctgacgggaatgtccaaaaaaatgggctacacatacaccagatatgccgacgatctgaccttctcagccccagcgcctgcaggtgaagacggtgacaaagcccggaacgacatcggcattctccttgcacgcgttcggcatattgttcaggaggaagggttcgccataaacccgaaaaagggccgagtgcagcatgccggtggtcgtcagtccgtcaccgggatcgtcgtgaacgataagctctccgtaccgagagaggaggttagaaagctgagggctatactacacgctgcgaagactaccgggctggctgcccaaaaccgggaaggcatcccacacttcgaggcttacgtccggggcaaggtcgcttatttgcacatggtggatccagagcgggctgctcccttgcttcgagccttagaagcattgggatga

SEQ ID NO: 13787 - RNA, 1650 nt, synthetic construct
  source 1..1650: mol_type = other RNA
atgggctcgttttggaatcggctaaaagggctctttacgggtggagatacccccggagatgccgctccagctcaagggacaacagctgcgccacctgctggtacagctgctcccagtaccggagctcccgctagtacagccacaccgccacaagcccaagcccctcaagcccctgctgtcaggaacccctacgaggccaacgaggcaatcctgggcctttcacctgaggagttccggaaacgcgccctgaaaattgtcccttggcgtaccgcgtggattgggagggttgataccataccgccccagagtgatgaacgcacggcactcatcgataaaggactgctcctgcgcgggttcttgacccgcgaacagctcgcggaaattcatcgagtgggagacttatggctgaagcatcacgacgctgatcggcttgcccacgcagctgctgccaagaccgcagaagctgcagtggaagcgaggagggcggagagaaagaagagaaaagaggagaagcaacggcagagcgccgaaaggaagcagcagagagcagaggacattgccagacgaaaaagggaggacataattttcttgggacgtggcgtctctagcggccttgctgaccggaggagcaatatcgaggccctgcaggcatccaagctcccagttctgagcagcccagcggacgtagccaaggcactgggcttgtcgatccctcagctgaggtggttgtgctttcatcaggaggccgcagaaaagactcattatcactacttcgaggtgccgaaaagatcaggcggaaaacgcctgctttccgccccccagccaactttgaagcaggcccaggcctggatcctggaaaacatcctggagccccttcccacggaagctccagcacacgggtttataagagggaggtctaccgttagtaatgccgcagcacatctggacagagacgtggtcgtcaacctggatttaaaggacttttttccgactatcacattccgtagggtccgtggtgtgtttcggcgactcggatattctccctctgtgtccaccgtgttggccctgctctgtacagaatcaccaaggcggcaggttgactacgatggcaaacgctattgggtggcagtcgccgaacgcgggttaccacagggtgcgtgtacttcccccgctctttccaatcaggtggccagaaaactggaccggcgcctgcgaggacgaatggctaagctaggctgggagtacactcgttatgcggatgatctgaccttttctgcccctgccggtaaaagagaacaagtgcctttcctgatggccgccgtacggcacgtagcagaggaggagggcttcgcactgaaccccaacaaggggagagttcagagagtggggggccggcagagcgtaactggcattgttgtgaacgaaaagctctcagtgcctcgcgaggaagtgcggaggctacgagccattctacaccaggcaaagactaccgggttggctgcccaaaatagagagaatcggccagatttcgaggcctggctccacggtaagatcgcatacgtgtgcatggtcgacaagcctaaaggcttaaagctccttgaagctttcgaggccctgcgctctggaaaacaggcctccgctggcagctga

SEQ ID NO: 13788 - RNA, 1605 nt, synthetic construct
  source 1..1605: mol_type = other RNA
atggcaagcttttgggggagagttagggggttctttgggggcggccaacctcccagcgattttgagacttcagccccatctcctggagcttcccccgttcctagagccgctgctcccgcaagtgccgcttcacctgctaaaaacccatacctggcaaatgaggaggtcttgggcctgtcagccgaggagttgaggaagagagctctgaagatcactccatggagaacagcttggatcggccgcaccgatgtcataccaccccagtccgatgagcgcacagcaatcgtggaccggggactggtgctgagagggctgctcacaaaagagcagctcgccgaaatccataccgtgggtgatcagtggctaaagcaccatgaggcaatgtctatggctggagcgcttgcagccaagtccgccgaccaagccgtggaacagcgacgcaaggagaaagcccagagaaaggccgaaaaacagaagttggcacaagagagggcccaggcaagagcggcagaagtggcacggcgaaagaaagaggaggttgccttcctggggcctggagtatccagcggactgtccgaccgacggtctaatattgaagccttagcagccgccggtctgccggtgttatcgacaccggcagacgttgccaaagcactcgaggtgacagtccctgagctgcgatggctctgctttcactctgaagctgccgaacgtacccattaccggactttcgaggttccgaaacggagtggaggggtcaggctgttggctgcgccaaagaagaagctagccaaagcccagggttgggtgctccgcagtatcctggaaaaactgcctaccgagaagccggcccatgggtttgtcaaaggcaggtctatagtgtcaaatgcagctgctcacctgggcagggatgtagtcgtgaacctggacctgaaagacttcttccccactgtaaccttccccaggattcggggggtgttcaaaaaagcgggatacagccccgccgttgccacagtccttgctctgctctgcactgaaagcccacggagagaggtggaatatgaaggccgtcggtactttgtcgctgtaggacctcgggcccttccccaaggtgcgtgtacgtcccccgctctttcaaatcaggtggccagaaagctggatagacgcttacggggcaggatggctaaactcgggttcgaatatacgaggtatgcagatgacctcaccttcagcgctcccccaggtaagcgcgagaaggtcggctttttgaaggccgccgtgaggcacctcgtggaagaagaaggctttaccgtgcaccctgagaaaggctccgttctgagtagcagtcgacggcagcgcgtcactggcattgtggttaacagaaagctgagcgtgccacgggagcaagtacgccgcctacgtgcgatccttcaccaggcgcgaaagaccggcttggccgcacagaacagggagggcaggccaaacttcgaggcatatttacagggaatgattgcctgggtttctatggtggacagagagaagggtcagaatctagcgcgccagcttgccgaactcgtggtcgctggacgtcgtgctgctgggtga

SEQ ID NO: 13789 - RNA, 1608 nt, synthetic construct
  source 1..1608: mol_type = other RNA
atggaacgcgatggtcgatacctgtacaacccatatagtggtgactcttctgccactgctctgagaaatgcgcctcctgcgcctgctcctgctcctgtaaggactaccgctgcctctacaccagccccctaccagacaccgccaccaccaaggacaataaatgagaacagctacgcggccaatcccgaaattcttggactcagtgccgatgatctgcgtaagagggcactgaaaatcgttccctggcgcacagcctggattgggcgtgtcgatacaatcccaccacaatccgatgagcggaccgcactcatcgacagggggctgatgcttggcgggtacctaaacgaaaagcagctggcagagattcacacggtgggggacttgtggctgcgacatcaggatgcaacccggttagcagaggctgctgcagccgaggctgcagacgatgctatcgaggccctgaaagccgagaaggcccgcctcaaagccgaaaagaagaaagccgctgcagaacgcagggctgctagggctgctgaagtagctcggaggcgggctgaggatattattttcctgggccggggggtgagcaaaggcttacatgacagaaggtcaaatatcgagcggttaaccgagaaggggttgcccgtcatgagcactccggctgacgtcgcggctcagcttggtctaaccgtccccaagctgcgttggctatgctttcactccgacgcagcccagacggtccattatactgctttcgaaatacttaaacgctccggaggcacgcgactcattgcagccccacgacccactctggccaaagcccagacatgggtgctccgcaacctgctggagaagctgcctgtggaagagaatgcccatggattcgtgaagggaaggtccaccgtgactaatgcgcgggcgcacgttggacgtgacgtcgtagtgaacatcgacttgaaggacttttttcctagcataggcttccgcagagtgagaggcgtatttaagagacttggctacagccccgccgtcgcaacggtactggcacttctctgcaccgaggcgcctaggaggaaggtggaatatgatggacacacctactttgtggccgttggtgagcgagccttaccccagggagcctgtacaagtcccgcattgtctaaccaggtggccagaagactcgataaacgcctgagatctcggtcacaaaaagctgggtggacttatacccggtatgccgatgatctgtcattttcagcgcctgcacaaagacctgcagccgcacaactccaggcaatggttcgacacgtggcccaagaagaaggcttggccgtgaaccccaagaagggtcgcgtgttggttcggggcgggagacagcaggttactggtattgttgtgaatcagaaaacatccgtgccacgggcccaagtcaagagactgcgcgccatccttcaccaggccaagaagaccggcctggctgcccagaacagagagcagcacccggacttcaccgcgtggctcaagggaatgatcgcatatgtcacaatggtggacagcgctaaaggccataaactgaaagcagccttcgacgccctcagtccgtcgtga

SEQ ID NO: 13790 - RNA, 1908 nt, synthetic construct
  source 1..1908: mol_type = other RNA
atggcctctttttgggacaaactaaaaagctggatcggtggggggccatcttctactccacctgacccttctgaagagacttccgatctggctcgtagagtggaggccatcgtcgtgaggcggatgacccgcaaggagagctttgaggctatcgaaatcgctgatgaagccgcatctgccccggaagatcgcacggtcaagggcattgcagcggcttccgccgtggtagcccgcttatacgatgaaggccgattcgagcccctgggctacaccaggaccaagctcgctgacggcaactggctttatcacctgaagggtgctgacttgagcaaacagtccgcaaccgctcctgccgctcgaactaccccacggtcaacagcacctgctaccaggacagccccccaaactacacccgcccaaacgacagccccagtacctgcggcacctgctcccaaagcaaaagacccttacgcagcttccgaaattcttggattgtctgcggacgagatgcgtaagagagcccttcggattaatccatacaagacagcttggattgggcgggtcgacactataccaccccagtcagacgagcggacagcgctgatcgaccgaggactgatcctgcgaggactactgacagagaagcagattaccgagatacacagagtgggagacttatggttaagacaccatgaagctaccaggctggctgcaagtaccgctgccgtagcagccgccaagcaaatggaggatatcgcacgcgaaagggccgagaagaaggcgcagaaaaaacgggaagccattgagagggaagcccggcgggctgaagacgttgcaaggcgaaagcgtgaggatatagtctatctcggtgtaggggtgtccaagggccttgccgaccgcagatcccatgtggaggcactgctcgacaggggtttaccagtgctgtcaactcccgccgatgtggccagagcaatgggcctgacaatcagtgaattgcggttcctctgctttcacgccgaggcagtagaaaagccacactacatttactttgaggtcccaaaacggtccggcggcaaaagactcttggcaagccctcagccccgactggctaaagcccaggcctgggtgctgcatgaggtgctggagaaactgcctactgaagatcccgcgcacggatttatcaagggaagaagtaccgtcacatgcgccatcccgcacgttgggcgagatgtggtggtgaatctcgacctgagcgacttcttccccactataaccttttcaagggtccggggtgtgttcgagcgtctgggctactcgccagcagtggcaaccatcttcgcactcctttgtactgaggccccccggagccttgtcgagttcgaaggaagaagatatcatgcagccgttggtccgagggccctacctcagggagcttgtacgagccccgccctcagcaatcaggttgcccgcaaattagataggcgactggccggcatggcaaagaagcatggatacacctataccagatatgcggatgatctgactttctcagccgacggcaagagtgccacggaccttgggatgctcctagctcgtgtgcgccatgtggttagtgaggaggggtttgccattaaccccaagaaagggaggttgcagcgcgctgcgcggagacaaatggttacaggcgtggttgtgaacgatagaccttcggtcccccgcgaagaagtccgcaggttgagggccatcctgcaccacgccgagaaaacaggcctggcggcgcagaaccgggaaaatgttccacattttgaagctcatctcagggggcgcctcgcttatctgcacatgatagatccggagcgcgctgcccctatgttggctagattcgaggccattgtggcacgtgcttga

SEQ ID NO: 13791 - RNA, 1527 nt, synthetic construct
  source 1..1527: mol_type = other RNA
atgccgcctccacgaagtaccaaacccagtgctggccaagcccccccaattcaggctgccgctcctcctccgccaaagcctcagccagaggaccctctggctgccgaaattctcgggctcagcgcccaggaactgcggaagagagccattaagatcaacccctatcagaccgcctggattgggcggacagatacgatccctcctcaaaatgatgagcggacagcaattatagatagggggctgatcttgaggggactcctcacacccgaccagattaccgagatccataggattggcgaccaatggttgactcatagagaggccgcaaaaatggcccaaatcctggcagcccgatccgtcgaagaagctctcgcagctagacgcgcagaacgggaagccaaaaaggcccagaaaaaagccgagtccgaggcgcgcaaagctagaataaaggaggaaatcgcgaggcgtaaagcggaggatatcgtttatctaggcgcaggggttagccatcttctgcacgaccgaagatctcatttggaaaccctggaaagcaggggccttcccatactttccacacccgctgatgtggcccgcgcattgaaccttccaattggtaagctccgctggctatgcttccactctgaagcgactgagaagccacactacagatattttgagatccctaaacggtcgggcggtacccggaagatagcggcaccacagccagaactggccaaggcccaggagtggatcttcactcacatactgcaaaagctgcccacagaggacgccgcgcacggttttattcccaatcgcagcactgtaacttgcgccgccccccacgttggtaaggatgtggtaattaaccttgacgtgaaggactttttcccaacaatcacgttcgtccgtgtacggggcgtctttcagaaactgggctattcacccgctgtcgccaccatctttgccctcttatgtacagaggcaccccgggtggagacgtcattcgaaggccagacactgtgggccgcagtgggacctagagcatgtccgcaaggggcctgcaccagtcccgctttgtctaatcaagtggctcgtaagctggaccgcaggttcgtgggcatgtctaagaaacatggatttgtgtacactagatacgcagacgaccttaccttttcagctcctgaagggaagcgggctgagataggaatgctcatggcaagggtccgccacatcttagctgaggagggattcaccttacatcccgataagggaagggtccagagacgacagcaccagcagctagtgactggcattgttgtgaaccagaagctgggactcgatcgtaaacacatccgaaggttgcgcgctatcctgcatgccgcccagaagaccggtctggaggctcagaacagggagaatatcccgcacttcgaagcccacattagagggcacctggcgtacctgcatatggtggctcctgataaagccgcaccactgttacaggcactgaattccctcccaaaatga

SEQ ID NO: 13792 - RNA, 1887 nt, synthetic construct
  source 1..1887: mol_type = other RNA
atgtccttttggaaaaaagtgaaaggttttttcggcgggggaggcggtgatgaaccaccagaaggactcacagggcacgacccgaaggttgccgctgaggtgatcgccgtcctgagggtcaggtgcgcagctcaaacttccttcgaggcagtggatattgcggacgaagtcacaagagacgatgctagtaggggcgtagcacagattcgggccgcctgtgctattgtggaagcgctgtacgagtccggttggttttccaccttggattatgtgaggaccggggctatttaccatcacacctcgaaggcaccctcctcttatgccccccctagaggcggcagtacattccctccacctgcacctccagcccctagaccagctgcgccaccaaccacgcctacagcgacaaaccccacagctccagcagctcccgcagtacctgccgtggatcccttagctgcagaagccatcctggggctttcacccgaggagttccgcaaacgcgccctcaccattaaaccgtatcaaactgcttggattggccgggtcgacactatacctccccagtcagacgagaggaccgccttaatcgacagaggactgctcctccgtgggctgcttacgcgggagcagctcgaagagatccaccgtatcggcgatcagtggcttctccatcacgaaagcgtgaagttagccgagatcgctgcccaggcaaacgttgaggcttacttgagggccgcaagggaagagaaggccagactaaaagctcagaaaaaggcggagtcagctgagcgagaggctgtgcgtaaggccttggtcgccaaacgccgcgccgaagatatcatctacctggggagaggggtatctggaggattggccgaccgcagagcgattgttgaggagctagagcgtcgcggactgccgcttcttggcagtccagccgatgtagcccgagctctgggcctgacagtgcctcgactcagatggcttgcattccacgccgaggccccaagcaggacacactacgtgtactttgaagtgcccaagcgaactggcggtctgcgacttctatccgccccgcatgacgatctgaagaaggctcagcattggattttggaaaacatcctggcaaagcttcccgttactgatgcggcccacgggtttgtaagcggccgctcagtcgtgagcaatgccgcagcgcatctgtgtcgggacgtcgttgtgaactgcgacctcgagtctttcttcccctctatcacctttgggcgggtcaggggagtgtttgaagctataggctacagccctgccgtcgctactatactggcactgctctgcacagaagctccgcggaccaaagtcacccatgagggcaaaacctattgggttgccgtcggagcccgaggattgcctcagggagctcccacatcgcccgcactcagcaatcaggtggcccggaagttagaccaacgcttaacgggcctcggtaggaaactgggctggtcttataccagatatgcagacgatctgactttcagcgcgggacccggtaaacgggaacagattggttacctgctggcccgcatcagacacatagctcaagacgagggctttgccatgaacagaaagaagactcgggtgcaaagggcagctcggcgacaggaggttacgggtgtggtggtgaatgacaagctgagtctggccagagaggaactgcgtcgcctacgcgccattgttcacggggctcagaaaaccgggctcgcagcacagaatagggaagggcgggaggatttcgaagcgtggctgagaggaaagatcgcttatgtgtctatgatcgacgccgccaagggcgaaaagttgcgggcagctctggatgcagcccctccatga

SEQ ID NO: 13793 - RNA, 1878 nt, synthetic construct
  source 1..1878: mol_type = other RNA
atgtctttttggaacaaggtaaaacagttctttggagcaggagaagcacctgagggacccgccaagacgggagacgcattgagcgcccatgatgccgcgctcgtgagggaagtgagtgcaatcattcagatcaaatgccagaatggggagctattccaggccgtggatgtggccgaccaaggtgggtacgctgctaagggcattccccagattagggccgcctgcgcagttgtggaggcgttacacgacactggccgctttgacgcactggggtatactcgcacagacgccgtctatcacccggtgggggcttctcctgactcctacgtaagaccacgcgcagctgccctgggatctcctcctgctcctgctccaaggcccgctcctgttgctcagccagcaccagtgtcagccgtaaggcaggctgacgcgaaggaccctcttgacggcggcgacattctaggcctctccgccgaggactttagaaagagagccctcaagattaatccttacagaaccgcgtggatcggccgggtggataccataccaccgcaaagcgatgagagaaccgccttgatcgaccgcggcctgatccttcgaggcatgctcaagccggaacagatcaccgagattcaccgagtgggagacttgtggcttaagcatcatgatgcgatgcgcatcgcggaaatcgccgcccagaagaatgccgatgcttttttggaggcacggagagcggaaaaagccgccctgaaggaacagaaaaaacgtgaagccgacgagagacgggcaaagcggaaggctgagatagctcagaggcgagccaccgatatcgtgttccttgggagaggcgtttcagccgggcttgccgatcgcaggacacatattgaggagctcgctcgtcggggcctcccaatcctgagcacccctcaggacgtggctaaagctctgggactggacgtcccccggctgagatggctggcattccacgcagaggctcccgcacgtacccattatgtgcacttcgaaatacccaaacgttcaggcggtactcgcctgttgtcggcaccgcacgatgacctgaaaaaagcacaacactggattctggagttcatcctctccaagctgcccgttaccgaagcggcccacggttttgtgccaggcaggtctacggttacaaatgctcggatgcatgtcggacgggatgtggtcgtcaactgtgacctcaaggatttcttcccatccattacattcaagcgagtcagaggtgttttcgaagttataggatacagccctgccgtgagcactattctggcactactctgtactgaggcgccaaggacgaaagtagtgcatgaagggcgggagttttgggtcgcagtcggagaacgtgcccttccccaaggtgcccctacttcccccgctctgagtaaccagattgcccgcaaattagatcagaggctcgagggggtgtgcaaaaaaataggttggagctatacccggtacgctgatgacctgactttttctgctgagagtggccagcgggagcggatcggatggttactggcccgagtcagacacatcgcacagaacgagggttttgccttgaacgcaaagaagacaagagtacaaaggaatgcccgcaggcaagatgtgaccggggtcgtggtgaacgataaacccgctacaccacgagaagagattaggagattacgcgctatcctgcatggcgctaagaggacagggctggagggacagaataggcaggggcaccccgccttcgaagcctatgtgcgcggcaagatcgcctacgttagtatgatcgatcgggaaaaaggcgaaaagcttagacgagagctggatgtcataacagggtcatga

SEQ ID NO: 13794 - RNA, 1617 nt, synthetic construct
  source 1..1617: mol_type = other RNA
atgggattttgggacaaggtgaaagccttctttgtcggcccacctgcagagccaagcgtggcagatgatgactcagaatccggttcctcacctcctcctgctaaaggcagtaggagcagtacacaggccccaagggctccttctcgggctgcagaatccgcccctccacaatcagctgattcctttgccgcgggggaaatcttgggcctctccgcaaaggacatgcgcgcaagggcattgaagataaatccgtatcacaccgcctggattggtaggattgacactatcccgcctcaaagcgatgaacgcaccgccctgattgacagggggttaatcctgcggggcctcctgagtaaaagccagatcgacgagatccaccgagttggagacatctggctgagacaccacgatgccgcaaaactcgctgaggccgtggcggctgctaaagctcagagggctgtcgacgatatgcgcgccaggaaagccgaggaaaaaagacgtaagaaagaggaagcggcccaacgaaaggccctcagggcagaacaggtccagcggagacgggaggaggacattgtgttcctcgggcgcaacgtaagtgcgtcattagctgaccgccggagtcatgtggaaaagctgagcgaagccggcttgccgttgcttgccaccccaagcgacgttgccaaggccttgggtattaccatcagacagctccgctggctttgtttccatgccgaggctgctctcaagtcacactatgtgtattttgagataccaaaacgcaccggcggaactagacttcttgcagcgccccacaggcatctggcccaagcacagcgctgggttctagacaatatcctgcgccgcatatctcccagcgaacccgcgcacggatttgtcgctcagcggtctacagttaccgcagctgccccccatgtgggaatggatgtggtagtcaatctggatctgaaggattttttccccacaattacgttcccaagggtgcggggactattcaagtccatggggtactctcccgcctcggccactgtactcgctctgctgtgcactgaatgccctcggacccccgtggatcatgagggcttgcgttattgggtcgctgcaggagagcgcgcattacctcagggggcctgtacttcgccagcaatctccaacctcgtgggtcgaaaactggaccggaggctggtgggcatgtctacaaagatggggtggcattacacacggtacgccgatgacctgacattcagcgctccagcagggcacagagaagcgatcggtatactgctggcacgagttaggcacattctacaggaggaaggctttcagttacaccccagaaagcagcatattcaaagagccgccagacgacaacaggtgacgggcatagtcgtgaaccacaagctagctgtgccccgtgaggaggtaagacgactgcgtgcaatcctgcataacgccagacggaccggactggccgctcagaatcgggatgacatcccccacttcgagtcttggctgcagggtaagattgcgtacgttcagatggtcgatgctgagcttgggcgtaaactcgccgagcagtacagagcccttactggctga

SEQ ID NO: 13795 - RNA, 1590 nt, synthetic construct
  source 1..1590: mol_type = other RNA
atgggcgtgtgggagaagctgaaaggcctgtttagtcggccaccgccacctcctagtggtccaggtgggcctgctacaccatccagcgccagtagcttatctagcccctccaacctgtctggagctggagcaagtggagcgcccgcgtctgacccttatcaggcctcggcaatcctgggcctctcctatgacgaaatgcgaaagcgagcaatgaaaatcgaccctatgagaactgcctggataggccgagtggatacaattcccccacagagcgatgagcgcactgctctgatcgacagaggactcatacttcggggattcctgacaaaagaacagatcggggagatccacagagtcggggatttgtggctccgttttcatgaagctgatagacttgcaaccacggtagcccaacgggaagccggcgaacttatgaagaacctcgccgaagagaaggccaaaaagaaagaagagaaaaagcggttggctgctgaaaggagggctgcccggcagcaggcaatcgaaaagaggagaagagaggatatcatatacctcggcgctggagtctcaagcggactgcgcgaccggagatccaatctggagcggctaaatggtgcggggttgcctgtgctgtcaacaccggccgatgtggctgcagcccttgacgtatccatcggcagactgcggtggctctgctaccacagtgacgcagccgagcgactacattacgtgcgttttaccattccaaaaaggagcggtggccaaagagccattgcggctcccctacctgatttgaagcgggcccaggcctggattctggagtccgtgctcgaaaagctggaggtggagcccgaggcgcatggtttcgttgcaggcagaagcactctgactaatgcaacaccccacctgaagagggaggtcattataaacctggacctggcggatttcttccccagcattgggtttaggcgcgtgcgcggggtctttgaggcaattggctactctcctgccgtagccaccatcttcgcactgttatcaaccgaggctccccggatggaagtcgattacgacggccagaagctgcaggttgctgttggagagagggcactcccccaaggcgcacctacctctccagccctttccaatcgcgtggcccgtaaattggataggcgcctcaggggtatggccactaaacatggctggacatatactcgctacgctgacgacttaaccttctcagccccaacggggcaccaaggtgaggtgcctatcatgcaggcgcgtatccggcatattgtaggggaggaggggttcgctgtgaacctgaaaaagggacgagtccagcgtaggtcagggcgccaggaagtcaccggcgttgtggtgaatgaccggcccggactcccgagaaccgaagttcgcaagttacgagcaatattgcaccaggcaaaaaaaacgggcctggctgcccagaaccgccaatctcacccaagatttgaggcctggctgaggggcaagattgcctatttgatgatgatcgatccggctaggggaaaggctatggccgccgaacttgacgcccttgtggggtga

SEQ ID NO: 13796 - RNA, 1980 nt, synthetic construct
  source 1..1980: mol_type = other RNA
atggccgggctgtgggaccgcattcgtgccttcttccgttccggccgtggaggagatgctgacgcccagatagaacaggcagtgagagtggccctcgtcaggagagtcagcggtcggtcagtgtttactccgttagagctggcatacgacatcgtaccaagagaggatcgttctgacgaagtgatagaagcaattgcaacagctctggatcggctctacgtacgcgcttactttggacctttcaattatgctcggagcatcgatcccaagtccgcctacagatatgtctatcatcccgccgggacaagagtaccagggacaacccctgataccactagggttagagccgaaccggaaagtgagcccccccctccaccagcaccaacaaggagtacccgcgcctccacagtgtctggcagtacccgagcacctacgagcgtgagctctaggggaggaagcactgcccggggtgcttctacaacaacaagcggtagaggggctccttcttctgccagaggcgcgtatcgcacagccgctgacccctacgctaggcctgagattctgacattgagcgccgaagagttgcgagccagggccgtgaaaatagacccgtacaaaaccgcatggatcggccgcgtggatacgattcccccccagagtgatgaacggactgctatcatcgataggggtctaattcttcgcgggctgttatcagaggcccagattaccgagatccatagagttggcgatctgtggctccgacattccgaagctgcaaggctcgctgccacgactgctgctaagaccgccgaagatgccgtacgccagatgcgagaggaaaaagtgcgtaaaaaggcgcagaaaattaaggaagctgccgaaaagaagagaagatacgctgaaggcgtggcgaaacggagggcgaccgatataatttttctggggcggggcgtttcgtccaaactgggggacagacggagtgatatcgagaagctggacgcgcagggcctgccagttttgtcgacccccaaggacgtcgcagacgcccttcggaccaccatcagcgaactaagatggctggctttccattccgacgcggccgaacgaactcattacgttacttttaccattcctaaaaggtctggagggaccagatcactatccgcaccccacgagaagcttgcaagggcgcaaaagtgggtcctcgagcacgtgctggccaaattaccgaccgagatccctgcgcacggctttatccgcgggcactcaacagtaactaacgccctgccacacgtcaagcgcgacgtggtcgtcaacttggacctgaaggatttcttccctactgtgtcatttgcccgagtaaggggagtcctggagaaggtgggctacagccccgcagtggctaccgttctcggactcctctgcactgagagccctcgacagatcataacgtacgctgacaaaccctatcacgttgcccttggccctagggcattgccccaaggggcctgtacttcccctgccctttcaaatcaagttgcccgccggctcgatcgaaggctgagtggtctgtgcgcaaaaatgggatggacatatacccggtatgcagatgacctgaccctttctgcagacgagggtcaccggggagagctcccagtgttgatcgctaaggtccgtgagattgtggaggacgagggtttcaaaatcaacccaaaaaaggggcgcgtccagcggaaatcagccagacagacggtgacaggagttgtcgtgaatgaccacccaaccgtgccccgcgatgagtataagaggttacgggccatcctgcatagggctaagtttacaggccttgacgcacaaaacaaggaggcgcgcccacacttcgacaagtgggtggaaggcaagattgcttacatttccatggtggatgctactaaaggcgcacggctgaaagccgccttcgacgcaatcccgaagacttga

SEQ ID NO: 13797 - RNA, 1836 nt, synthetic construct
  source 1..1836: mol_type = other RNA
atgtctttctggaaaaaagtcgtggattttttcaccggcgggcccacatccattgagacatccgcagttggcactagcggttcccctctggaagccgccatctggtctgctataaagtccaggatggccaagggcgagtccttcaccccaatcgacgtggtagatgacgcaacttcttcaacacccggacgcaccgtgaagacaattaccgatgggattgctttcgttgacgctttttttgccagaggcctctttgccccgcacgggtacactcggacactgacctcaacgcccagcggacagaactggctgtaccatccggcatcatcggccccgcttgttgcaatgccggcgattgtcgctcaacccgccttgaaggccagcgctcctgccattgatccttatgatgtgggtagtctcctgacacttacccccgcggaactgcgcactcgagcgcttaaaatcgtgccttggaggacagcctggatcgggagaacggatgtgattccccctgagagtgacgaacgtactgctctgatcgatcgcggactggaactccgcggcctcctaacaagggcccagttggtggagatccaccgcgtgggcgacgaatggctgaaacacaaggatgcccctaggttggctcagtctagggccgccaaaaatgcagaagaggcggttgcacagttaagggcagagcgagcacggactaaagaggagaagcgcgcagcttccgaggctcgtaaaaaagctagagctgagcggattgccaggcggaagcgggaagacattgtctatctaggccgcggggtcagtgcacttcttggcgacagacgtgcccatgtagaaaagctgaacgctctgggactaccagtaatggcgtccccagccgatgtggccaccgctttgggagttactatccctgctttacgattcctgtgcttccatgccgaagccgctagacgggcccactacgtgcagtttgatgtgcccaagcgcagtggaggtgtccgcagactgtcagcccctatgccacgtcttgccgctgcacagcaatgggtgctggagcacgtgctggagaagctgcctgttgaaagaccagctcatggcttcgtgccaggtagaagcacggtaactaacgcaagagagcacgtcggcagagacatagtcatcaatctggacctggagtctttttttcccagcattactttccctcgagtgcgggggctgtttgtcggtgtgggctactctccagccgtggccaccatcctcgccttgctctgtactgagagtgcaaggacccgggctgagtatgacggagctaagtacgacgtggctaccgggccaagagccttaccccagggcgcatgcacaagccccgccattagcaatcaaattgccagaaaactcgatcagcgcctcagaggattggcagttgcgcgggggtggacgtacaccaggtatgccgacgacctgacattttcagcgcccgaaggtaagcgaagcgaaatcgcgcggctgatagcacgcatcaggcatgtcgtggaggaagaggggttcaggatccaggtcaaaaagggcagggtacagcgggcagggggtagacaaaccgtaaccggaatagttgtcaatgagacacacaaactcggcgtgccacgcgaagatgtgcggatgctccgagccatcctacacaacgcgaagaaaaccgggctggctgctcagaaccgggatgcaaagccagacttcgaggcctggttgaggggaaagatcgcatatgtgcagatgatagacagggcccgtggagacgctttactgcgagcacttgatgccctctga

SEQ ID NO: 13798 - RNA, 1596 nt, synthetic construct
  source 1..1596: mol_type = other RNA
atggggctgtgggattctgtgaagcggctgtttggcggtggtgatgccgccagcccagatgagggtaaggaggaacgggaggaaagaggtggtggctccgctgctagaggaggggtgtatcgcagtgccccggagagaggagagcctgatgcaatcgacccctatggtaaaagccccgtgatgggatactccgaggatgacgtaagagcacggttcttcgctctgcgccgtggcggaatctctccctttttccaccccgaccttctgccggcacctgatgatgagtttacccagttggttgacaggtcactcgtgctggcagggctcctgactcaagaagaactggaggctattcatagaacaggcctggagtggcggaagcataggcatcgagctgaccacgctcgcatcgtgggaaaagccgcagcaggggaagccgtggaaatcctgaaacaggagcgggccgagaacgcaaaacggaaaaaagccgaagctcgcgcacggcgtgaagcacgaagacaggctatagagcagcgcaaacgggaagatattattcatctgggccgcggcgtctctaatcgactcggcgaccgcagatcccacgtggagaagttgcaggctgcggggcttcctgtgttgtctgggcctgcagacatagccgttgcgctcggaattacaatcggccagctaaggtggctttgttttcacgatgaagccagccgtaccagtcactaccaccaatttacggttccaaaaaggtcaggcggagttcgggtcttagcggctccaatgcctcatctgaagcgtgcccagactttcgtgttcgataacattcttagaaagctggaggtcgaagagcctgcccacgggttcatacggggaaggagcaccgtgacaaatgcgcgacctcatgtcggccaggacgtcgtggtaaatttggacttagagggatactttccaagcgttactttccccagagtacggggcgtgttcgaacacctcgggtattcacccgccgctgctactatcttagccctgctgtgtacagagtgtgagagacggccaatgcgatacgctggccagcgttatcatgtagccatcggagacaggggacttccccagggagcgtgcacttcgccagctctggccaaccaggtcactaagaggctcgacaggagactggccggactctgcagagccttcgggtggcagtacacgcgctacgccgacgacttaacattctccgcaccggccgggaagcgagcagaaattcccaaactattgggcgccgtgaaaaggctgatcaccgaggagggctttacccttaatcctaagaaggggcgcatccaaagaagaggcggctgccaggaagtgaccgggatcgtggtcaacgacaagttaggcctcgcccgcaccgaagttcgaaagttgagggctattctgcacaacgctcgcaagacaggtctggaggcgcaaaatcgggagggtcgcccacactttagggcctggctacaagggaagcttgcctatctggcaatgatagatagggataaaggcaccgccatgctgagggaactcgaggaactccccagttga

SEQ ID NO: 13799 - RNA, 1722 nt, synthetic construct
  source 1..1722: mol_type = other RNA
atgttcgggccacacggctatacccgaactctcctgcaaaccccagcgggcaccaactgggtatatcatcctaagtcttcagcccctgcagctgtggcaccggttccaggagcagctgctgtcgcacccaggcctgcaacagctagtagcgcaggaacagttcgtgggcccctggtccctcaaggatcacggcttcctgcctcagtcacagctcatacggcctctggcggtgcccctgcaaaagatccatatgacctcggagtgtttctgaccctgacgcctgctgaacacagggctaggtccttgaaaatcaacccctatcagacggcctggattggacgtgtcgacgtgatccctccagagtccgacgagcggactgcactcatcgatagaggtctggagctgagagggctgttgactcgccccgagattgttgagatccaccggatcggcgacctttggctaaaacataaagacgcggctaggcttgccgagtctattgcgcacaaaaatgtggaagaactcctcgcgcaggaacggatcgccagacagctggctaagacgaaaaaaaaggaagagtctgccgccaagcggacccgagaagcagaggatgtgcagcggcgcaagcgagaggacatcgtgtacctaggaaggtccggtttagctaggaatgtcagtaaaggcctgtcggatcgtagaagcaacatcgagaagctcgccgccaggggtttacccaggttaagcagcccagccgatgttgcacgtgcactagagctggagattaagaccttgcgctttctggcttttcacgcagacgcccaaagacatgctcactacgtccagttcgaagttcccaaaaagaagggtggcactcgcaccctgtctgccccaaagccgcagcttgcgaaggcccagaagtggatactcgaggaagtgctggagaaactgccggtcgaccccgtcgcccatggttttgtcaaggagcgcagcacagtgactaatgctcggccacacgccggcaaagccatagtgattaatcaggatctggttgacttctttcccacaatcaacttcgccagagtgcgcagcgtgttccaacgggctggatatagtcccgccgttgctaccattttcgcgctgcttacaaccgagtgtccaagaattcaggctacctacgcaggccacacttactacgtagctactggacagcgcggcttgcctcagggagcatgcacctccccggccttgtccaacctggtggctagccgactagatcgccggttaactgggtatacctcaaaacatggctggacatacacacgctacgctgatgatctgaccttttctagcgccgaagaagctgaacccgggtcaccatccggagtggccaagctcctcgccacactccaccatatagcacgcgccgaggggttcactatacatcccgacaaggggaggattcagagaaagagtaaaagacagaccgtaaccgggatcgtggtgaatgaggcacacaagttgggggtacccagggaagacatacggcttgtgcgagccatcttacacaacgccaaaaagactggccttgcggcacaaaatcgggatctgtcccctacatttgaagcctggctgaggggcaagatcgcctacattacaatggtggacagagccagaggcctggcgttcagtgaggaattggagcacctggatctcgggcgatga

SEQ ID NO: 13800 - RNA, 1701 nt, synthetic construct
  source 1..1701: mol_type = other RNA
atgtttggaccccacggctatacccggacactcttgcagacccccgctggcactaattggatttatcaccctaaggcacaggctccaacggccttggcacccgtggtcaaagctgcagcagcggctccggttcctgtagccgctaagggaccccttgttccccaggggtcgaggctgccttcatctgttacaggacacaccgcaagcgctggccccgttaaagacccttatgacctcggagtgtttctgacattgactcctgccgagcatagagccagagcccttaaaatcaacccctaccaaaccgcctggattggacgaacagatgtgattccaccagaaagtgacgaaagaaccgccctgattgaccgcggactggaattaaggggcttcctctctcgggccgagattgttgagatccatcgcgtgggggacctatggctgaggcataaggatgccgcaaggctaactgagtccatcgctcacaaaaatgtcgaggccctcctggcacaagaaagattggctaagcagctggagaaggcacgtaaaaaagatatggccgcagccgccagggccaaacatgcagatgatgtggcccgcagacgccgggaagacatcgtgtacctcgggagatctggtcttgccccgggcctctcgaaaggcttagccgatcggcggtccaatatcgaaaggctcgctagccaggccctaccacgcctctcatcccctgctgatgtggctcgggcactggagatcgacgtgaaaaagctgaggttcctggctttccatgcagacgcgcaaagacacgtccactatgtgcagttcgaagtaccaaaaaagaagggtgggatgcggaccctgtccgctccaaaggccgagttagcaaaggcccagcaatggatactggacaacgtgttggagagactgagcgtcgagaagcaagcccacggcttcgtgaaagggcgcagcaccgtgacaaacgctcagccacatcagggcaaggcgatagtggttaaccaggaccttgtcgatttttttcccagtatcacgctgcgaagagtcagggccgtgttcgagcgtgctgggtactctcctgccgtggctaccatctttgctctactgactactgagtgtccgcgtacacgcgccacttacgctgggcacgaatatcacgtggccgtaggtccacgcggtcttcctcagggagcctgcacaagtcccgctctctccaatctcgtcgccagccggttagaccgaaggctgcagggctatacacaaaaacacgggtggacctacaccaggtacgcagatgacttgactttttcctgcgatcttgaaccggcggctgacagcggcaatgatatcgcaaaactccttgcgacgctccaccatgtcgcccgctctgaaggtttcacggttcaccccgacaagggacgcatccagcggaagtcaaagagacagactgtaaccggcatcgtagtgaatgaagccagtaagctgggcgtgcctcgagaggagattagattggtccgagcgattctgcataacgcaaagaagacagggctggcggctcagaaccgagagttaagcccaaccttcgaggcatggctgcggggaaagatagcctacattgcgatgatagatcggtctaggggtcttgccctgcagaaagaactggattcactggacctgggacgttga

SEQ ID NO: 13801 - RNA, 1647 nt, synthetic construct
  source 1..1647: mol_type = other RNA
atgtttaaaaggttgatcgacaagtttcgccaattggtgagccaccccgattctcccgagcctccgatgcccagccatggtccaagttctgcaccccctcctagggaagcagcccctggagctccacctttaccacgcgctgcccctggcgctgaccctaaaccatctaccttagatcagtactcgcctcccgacattctcggactgtccaaagaagagctgcgcaaaagggccttactcgtcaatccgtacagaactgcctggattggccgggtggacacaatcccgccacgttccgatgagcggacagcgctgattgataggggccttgtcctcagaggattactgaacgaggaacagctggctgagatccaccgcgtgggggatttatggctcacctttcatgatgcagagcgtctagcatcggctgctgccggcaagacggctgatgaggctattgaagaggctcgcaaagcgaagcaggcggcaagagaagagaagcgtcggcaagccgccgaaaggagagctaggagagccgaggaaatagccctttttaggaaaacccacctcgcctttagaggtgagggcgtttccgctggcctcagtgacagtcggagcgagatcgaaaaacttgaagccgcgggattgccagtcctcgcatcacccccagacctggcacgggttctcgacgtgtccgtgagtcgcctacgctggctggctttccactctgaagctgtgacacgaccacactacacgtacttccggatcgcaaagaagagtggtggcactaggttgcttgccgctccccacaaagatctggagaaagcccagcgctggatttttgaaaatatcctggccaagattgctgcagaaaagggcgcccatggcttcgttaaagggagatctactgtgaccaatgctgtgccccacaaggggcgagccatagtcgttaacattgacttgagagacttcttcccttccatcaccttcccccgtgtgcgcggtctgtttcagtccctgggatattctcccgccgtggcaaccgttctggcactgctgtgtaccgagtgccccagagtcgaggccgtgctagatgggaagactttctatgtggcagccggtcagaggggactaccacagggagccgctacctctccggctttgagcaacctggtagcaagaaagctggatcgacggctgagtgggcttgctcggaagaggggcttcatatacactcggtatgccgacgatctcacatttagctgcggcagagataaggactcagagctggggaggttcctggccagcgtgaggcatatcttgacggaggaaggatttactatcaaccccaagaagttcagagtgcaacgatcatccgcccgtcagagggtaacaggcattgtcgtgaatcggaaactgtccgtaccacgcgaggaggttcggcgaatcagggccattctccatcaggcgaagtcagcagggctcgcagcccagaaccgagaaaatctgcctaacttcgaatcatggctggaggggaaaatcgcctatataagcatggtcgaccgagccagaggagcggtccttaaggccgagcttgaccgggtacaacggcagcgcccagcggaagacagctcaagcacagcatga

SEQ ID NO: 13802 - RNA, 1677 nt, synthetic construct
  source 1..1677: mol_type = other RNA
atgggcctctggtcgtggcttgggaaagtctttaggagggttcgcgcatggctagcttacaatcctgaattgcctcctccgccccctgaggcgccaaaagtcgatgaactgcctcctccagccggtggaagtggaggagccggtgttggatatggcacagccaccgctaaaacctggactaccgctaaggcaaaagcacaacagaaaaaacccccacccaaacccaagaaagctgtggacccctgggatactggagaattactgactctgtctcccgaagagctcagggctagagccatgcacatccagccctggaagacacagtggattgggcgggtggatgttatccctccggagtctgatgagcgcactgccttggttgatcggggcctggtcttgcgcggcttcttcaccgaggccgagttagccgagatacacgccattggcgatgcgtggttggaacataaggatgctgcccgattggcaagggcacgtgcagcgaaggatgtggacgccgctcttgcgcaactacgggccgaggaacgcgaacggaaagccaggaagaagcgggaggccgcagaaagacgggagaggagagctcgggagatagctgaaaggaggcgtaccgatattgtgtttctaggacgaggcgtgtcccattcactcgcggacaggcgggcccatgtcgagaaactggaagctcgcgggctgccggttcttgccactccaaaagacgtggccgatgcacttggattacctatcccgcgcctcagattccttgcgcaccacgatgaggcactgcagagggcccactacgtccagttcgaggtgcccaagcgaacgggagggatgcgtacactggctgccccaaagcctgacctcgctaaggcacagacctggatcctcgagcacgtactggccaaagtacccgtgcatgacgctgcccacggctttgtgcccggtaggtccacagcaacatgtgcccgcccccatcgtggtagagctgctgttgtgaacctggacttgaaggactttttccctagtattaccttcccgcgcgtaaggggggtcttcgcagagctgggctatagcccagccgcagccacaatcttagccctgctctgcacggaatgtccacgccgagaagtgcgcttcgcaggggtgacctaccacgttgctgtgggggaaagaggcctgcctcaaggggcctgcacatccccagccctcagcaacctcgtggctagacggttggacgcccgacttgcaggtctggccgagaaaagaggatttgcttatacccggtatgctgatgacctgagcttttcaacgggcgaccccaaagccgtagcgccactgttggccatcgtgcgcaagatagtccgcgaggaaggctttagagaaaacgggaagaagacaagggtgcagcgggcagcaggaagacagactgtgaccggcctcgttgtgaatgagccagaccgtctcggtctgcctcgagaggaggtcagaagactgcgagctattctgcacaacgctaagaagactggtcttgcggcacagaatcggggcggccatccagactttgaagcccatctacgggggaagatcgcgtacctggcaatggtcgacgcccccaaggctgccaggttcagagctgagctggacgccctgaccggatga

SEQ ID NO: 13803 - RNA, 1731 nt, synthetic construct
  source 1..1731: mol_type = other RNA
atgctggcgagagccaaggcgagaagccatttttccgcgatcaatatcgatgttgtggtggcgagagctctgagcgccggcgaaagagcggagatcgctccctgggttgagcagctgttccgaaggggcgtactgcagggacacgcctacacccgcactctggtgagagcaggcgatcgggtgatctggatttaccatccacaggaccaagctcccgagccagtgtctcccggcagtccagctccttcagctgcggcagcttcccatgctgctcccaggccagctgcacatgcagccggaccactgctggatgcaggttctctgtggaaactatcccctgacgaactgcgtgctcgcgcccttgacgtcaagccgtacctgactgcttggatcggccgcgtggatgttattccgcctgcatcagacgagcggacagccttgatcgaccgcgggttggtacttcgaggccttctgacagaggcccagatcctcgaaatccatagggtcggagatttgtggctcgaacacagcgatgctgcccgcctcgcgcagttaagagcctacaaaaaggccgacgacgctatcctcgctttaagggctcgggatgctgagttgaaagccgagaagcgaaagttggccgccgaaagggctcagcgtaggagggaagagatcgcccgtaggaagaatgaggatattgtgttcctagggcggggggttagtgaacggctgcacgataggcgggccgatgtcgagaagctggagaggctcggactgcccgtgttagcaacaccagcagacctggccaaggcattaggcctgagagcacccgaacttaggttcctcgccttccacgcagaagccaccgaacgccctcactatgtacagtttgacgtgccaaagagatcagggggaactcgacggttgtctgcaccactcccgaaactcgccgctgctcagagatggatactagacaatgttctctgtaaggtcgcccctcatgacgccgcccatgggtttgtaccaggccggagcaccctgacgaacgcaagacctcacctgaaaaagggggtcgtcgtgaacctagatctacaagactttttcccgtctattacgtttcctcgggtgagaggagtgttcgcctctcttgggtactcgcccgctgtcgctactattctcgctctgcttacaaccgagcctccccgcagagcagtgagatatgccgagcgcacactccacgtcgcagttggttccagaggccttccccagggtgcgtgcactagtcctgccataagcaacctcgcctgcaggaaacttgaccgccgactctccggtctggccgcaaagcacgggctgacatatacgcggtatgccgacgacctgaccctgtccggaccaaaggatacccacgttgcccgcttgttggcgagcttacgccacttgattgagagtgagtcatttagggtgaacgacaagaaaggtcgagtccagcgtgccggtggacagcagactgtgaccggcgtagtggtgaacgacaagccctctgtcccccgatcagagaggaaacggctgcgcgccattcttcaccaagcaaaaaaaacaggcctggaaaaacaaaatcgggccggcgtgccttccttcgaggctcatctgcggggaaagatagcatacgtgagcatgatagatgggacccgtggcgcagaactcgccaaagccctggatgcactggattga

SEQ ID NO: 13804 - RNA, 1635 nt, synthetic construct
  source 1..1635: mol_type = other RNA
atggatgccctgcatgagagaggggttcccggtgcctacgacttcgagagaacccttctctcagtcgcaggaaggagtgtgtggatctaccatcccattggtgcgtctccaaatcaaccctccacaccacctcctccggtagcaactcccgctagcccgaccaggaccaaggccaagcagaaaggcaaggagaaagctttgcctgacccctacgctgccgggcctctcatgacccttacagcagcagaactgcgggcccgggcattgaccatagagccatggagaactgcttggattggacgagtggatgtcatcccacctcagtccgacgagcgtactgccctcgtagataggggattggtcctgcgaggctttttcacggaggaagaaatcgccgagatccacagggtaggggatctgtggctggaacacaaagacgcaacacgcctagccaaagcccgagctcagaaatcagccgatgacgccatccaagccctgagggaggaggctaagcgggaacgggctcggaagaaagccgaagctgctgagaaaaagaagcaaagggctgctgaggtcgcacggagaaaggccgaggacattattttcttaggacggggggtgtcagggaggctgaatgatagaagagccaacgtggagaagctggctgaagctggcctgcctgtcttggccactcccgcagatgtcgccaaggcactcggactcaccgttccacgcctacggtggctggccttccacgcagaagccagtgaacaggggcattatgtgcaattcgaggtgcccaaacggagcggaggtaccaggcgtctgtcctcacctaagaaggctctccgcgccgctcagacgtgggttctgaacaatgtgctggccagatgtggcactgaagatgcggcccatggctttgtgcctggtcgatctaccgtgacgaatgcacgaccacacgttgggcgccgcgtagtggttaaccttgaccttgaagacttcttcggcacaatcacctttccacgcgtccgtgggctgtttgtgtccctcggatactctccggccgcggcaacagtcttagcgcttctgacaacggaagcaccccgacgcgaggtgcggtatgatggcaaaccttaccgcgtggcggtaggcccaagagccttacctcagggtgcgtgcaccagccccgctctatcgaacctggtggcccgcaagcttgacaggcgcctgactggcttggcaaagaaacacggatggacttataccaggtatgctgacgatctgacatttagcagagacgatgacacacaggtcggggccctcatcgctactgtacgtcacgtcgtgaccgaagagggctttcggataaacgagaagaagggcagagttcagaagtctggaggccagcagaccgtgacaggggtggttgtgaatgacaaattaagcgtgccccgggcagaaattcgccgactgagggccatactccacaacgcgaaaaaaacaggcctgagtgcccagaatacttccggtcatccgcacttcgaggctcatgttcgtggaatgattgcgtacgtcagaatggtggatccagagaggggcgccaagttggcagcacagctcgctgccgtgagatga

SEQ ID NO: 13805 - RNA, 1671 nt, synthetic construct
  source 1..1671: mol_type = other RNA
atggagattgccccatacgtagacggctgggtggaagctggactactggataaacacggatatacgggaactgaacagatagtggcaggccgcgcggtgtggatttatcatagagtgggacaacctgtcgctggggtcaccccctcaaccagggtcaatgcaccagcccccactgcccctaaagctgctccgcagaaggccaagaagaaagagaaaaaaaagcgcaagtggttcgatccctgggacgccggtgacctgatgagcttgaccgccgcagaactgagagcacgcgccatgaaaatcgtgccatggagaaccgcctggattggccgggtcgatgtaatccccccgcagtccgacgaaagaacagcccttgtagacaggggtctgatactcagggggtttttcactgaggaacagattgaggaaattcaccgtattggcgatctctggcttaaacataaggatgccgcgaaactggcaagagcagccgctgctaagtctgccgatgctgccatcctacagctgagagaagaggcgaaacagaagaaggcccgactgaaggaggaagcgaaggcaagggccgagaaacagagggccgacgtagcccacagaaaggccaccgacatcgtgtacctgggtaggggcgtcagtggccagcttcacgatcggcggtcgaacatagaaaggctggagtcacagggtcttccactgttggctgctcccgcggacgttgctgacgctctgggagtgaccgtgagcagacttcggtggctggcgtttcacgatgaagctgccccagccggtcactattctttctttgagatccccaagcggtcaggtggcacacgcctcttgtctgcccctaaggcagagctgcgtgccgctcagtcttggattcacgagaatatcctgaaaaaagtggccctcgaggcccctgcccatggattcgttcctggccggagcacggtgacaaacgccgcaccacatgtggggcgcgatgtcgtcgtgaacttagacctggaagacttctttccaaccataacgtttgcacgtgtccgtgggctgttcacaagtctgggctacagtcctgcggtggcaacagttctcgctctcttgaccactgaggctccccgaagaagattgacttacgctgggcgcccctactttgtcgctgtgggaagacgaggactgccgcaaggcgcgtgtaccagccctgctctgtccaatttagtggcccggaagctcgatcgcagaatggcagggttagcgaagaagctcgggtggacttacacacgttatgcagacgacttaaccttctccgcccccgcaggacaacgcgatactgtcgggaggctctttgcacatgtacggcacatcgttcaggacgagggattcagggttaacgaaaagaaggggcgagttcagaggaagggcggtcgccaaacagtgaccggcgtggtggttaatgagcgactagctgttccacgggaggaagtccgccgacttcgggctatcctgaacaatgcaaaaaaaacaggcctggcagctcagaacagggacgaccatcctcacttcgaggcctggcttcggggcaaaatcgcctatgtgagcatggtggatccagataggggggccaagctcgcagcccaattggctgagttgtcctga

SEQ ID NO: 13806 - RNA, 1623 nt, synthetic construct
  source 1..1623: mol_type = other RNA
atgggcttttgggataaggtcaagcggttcttcgggggaggtggtgccttgcaacccgatccttccgcaccgacagccgctcctccatcaacgcctacaccatcaacaccggctcctgccccagcacatacagcgccagctccaccagccgctaggactgctccagcacccactagtacagatgatagtgctcgctttcggaacccagccatactgggcttgagcgccgccgaactgcggaaacgagcactgcggataaacccgtaccagaccccctggatagggagggtggacactatccctccccagtctgatgagcggaccgcgattatcgacagggggctgatcctgagaggcctgctcactgccgcccagatcgaagagattcatagggttggggacctctggctggcccaccatgatgcaatgagactggctgctgcagcaggggctgctagcggtgaagcagcagtggccgcagaaagagctcgacgtgctgaggccaagcgggccaaacaagctgctgcagcagcccgagctgccgctagagcagctgctgtcgcggctagaagggccaccgacattattttcgtgggaaggggagtgtccgccggtcttgccgatagacgaagccacgtggagcaactcgcggcggctggattgcccgtgttagctgcacctgcagacctagccgccgcccttggactgacagtccccagactccgctggctgtgtttccatgccgacgcccccgctaagacccactatacatattttacgatccccaagaggtccggagggacacgcaagttggccgcaccacacagacaacttgcggccgcgcagagatggattttcgatcagattttagccaaactgcctatcacagacgcagctcacgggttcgtgccaggtcgctctactgtgaccaacgctcggcctcacgtaggccagcgcatagtcatcaacctggaccttgctgattttttcccttcaattacctttccccgggtacgcggtctgttcgctagcctgggatattcgcccgccatcgccaccctacttgccatgttgaccactgaagccccacgcgttgaggttgagttcgccggcaggactcattacgtcgcaaccggacccagagccttaccgcagggagcctgcacatcccctacccttgccaatctcgtggcccgaaaactggacaggcggttggggggagccactcgtaagctgggctggacctatactaggtacgccgacgatctgaccttctctgcgcccgctgcagggtctgcacaagtggctttaatttttgccagagtgcgcgcgatcgtaacggccgagggctttgctgtgaatgaggcgaaaggtcgcgtgcaaaggggagggcgtcacacagtcacgggactggtcgtaaatgacaggctcgccgttcctagagaacaggttcgtcgagtgcgtgcgatcctccacggcgcacgaaccactggcctagcagcccagaatcgggccggtcaccccgattttcgcgcatggctccagggcaccatcgcgtacattcatatggttgaccctgcccggggcgcagcatttcaagctcagctggacgccctcagttga

SEQ ID NO: 13807 - RNA, 1404 nt, synthetic construct
  source 1..1404: mol_type = other RNA
atggaggaacttagagcaagagcggccaaagtaaggccctggcttagcccttgggggtggcgtatggacattatccctccagccagcgacgagcgaacttcactcattgaccggggtctggtcctgaatggctattttactgaggcccagatccaggagttccatcggatcggagatctgtggctcgaacacaaggatactgcaaggaccattgccgcacgggcactagagacagctaaggctgatctcgaagagctgaagaggaaaaaactggaagaaaaggccgccaaaaaagtggcggccgaagaacgccggaaagcacaccgcgcggctattgagaagcggcgactggaagacattgtgttcctcggccggggtgttagcggcaagctagccgaccggagatctgatgtcgaagctctccagcgggccggcttaccagttctcagctccccagctgatgttgcaaaggctctggagattacaattcccaccctgaggtggctggcattccatacggaggccgccggagcaatccattacagacagttcgaggtccctaagaagaccggaggggtgcgactgttgagtgcccccagaccaaagctcgctgccgcacagcggtggatactggagtcggtgttggccaagatagctccagaggcagacgctcacggtttcgttgacggcagatcaaccgtgtccaacgcgaagccccacgtggggagagatgtggtggtaaacgtggacctgaaagactttttcccgtcaatccactttcctagggttcgcggttttttcgaaaccttggggtactcccctgccgtggctacagttttcgccctgttgactaccgaggcccctagaaggcgcgtcgaatatgctggcaagccatactgggtcgctgcaggccctaggggtttaccccaaggcgcatgcacctctccagccatcagcaacttggtgagtcgcaggctggacaaacggctgtcctcaatgggcaagaagcacggggctacgtacacacgatatgccgatgatctcacacttagtcttgaccccggacgcagggagcagataggaatgcttctcgcacgtattaggcatatagctgaggatgaggggtttcgggtgcatcccaagaaagtggccatccaacgctctggagggagacagatggtcactggaatcgtggtcaataggggcctttctgtcccgagggaggaagtgcgaaagatccgtgccgtattacacgccgccaaacgctccggcttagcggcacagaatcgagaagggcatgctgattttcgcgcccacctgagaggaaaaatcggctatgtaatgatggtggacagacaaaaaggggaacgtctgttgcgcgagctggaggctctagcgccctga

SEQ ID NO: 13808 - RNA, 1980 nt, synthetic construct
  source 1..1980: mol_type = other RNA
atgggcttttgggacaaggtaaaatctttttttggaggcgcttccccacctggcggaggtgatggaggtgatgggggcaatggcgactcagatgaagcaccacctttatttaacgagaggggtctgcctaccgatgcttttactcagttcgttgaaagacgcgtccgggtgcgggcgaagaaagaacatctcttcacccgccacgacattgcaagaattgtggtgaagaagctggagtctccccctagtgctgcggagacatttgccgctaacgccgtgctcaaattgaagaaggccgggctcttcgaggaattggggtacgagtgcagttacagttccaccgtgaggggggaggtcttccatcctgaagggacagaccctgacgagtaccccggtgcaggaggaggaccacctagtggcgttagacgggtgcaaccccagccagttgcacccgttgcccctgctgcaccacctccaccaagacccgcaacaccagcagccgctgcaccagctagagcacccactaccccctataggtccaacccgttcgatgccggccagagcctaggaatgtccgctgacgagcttcggcggagggcaatgaaaatcgtgccgtggcgcactccttggataggacgggtcgacgtgattccgccagcctcagatgagcgaaccgcgctcatcgatagaggcctggtgctccgtggctatttcaccgaggagcagattgccgaattccatcgaataggtgacttatggctggaacacaaagatgccgcttcatttgtagctgcacgtgggaaggagcaggctaaactggacctggaagctctcaaacaaaagaagcttcaggagaaagctgagaaaaagcgagcagcagccgaaaggagagaaaggctacgcgaggccattgccaaacgaagggccgaagatatcgtgttcttgggacgcgggtttagcgggaagctggccgacaggagaagcgacgtcgaagccctagaaagggcgggtttgcccgtcctgtcgacacctgccgatgtggcacgtgcgatggaactgtctatcccgaccctccggtggctggcctttcactcagacgcagctgagacaatccactatcggcagttcgaggtgcccaaaaagactggaggcgttcgcttgctgtctagccccctccccaaacttgctcaggcccaacagtggattcttgagaacgtgctcgccaagatccccacaggaggggacgcccacggatttgtccctgggagaagcacagtttccaatgccaagccccacgtcggcagggatgtggtggtcaatgttgacctgcgggatttctttccctctatccatttcccacgggtgcgggggctattcgaatcacttgggtactctccagctgtagcaagcatcctggccctcttgaccacggaggctcccaggaggagagtcgtctacgcgcaaaagccatactgggtggctgctggccctcgaggtttgcctcagggagcgtgtaccagcccagccgtcagcaatctggttgcacgaaagctggatacgcggttggccgccatgtcggctaagcatggggctcgctatacacggtatgccgatgacctgaccctgagtctggaacccggccgtcgagatcagatcggcatgctgctcgcccgtattcggcatatagccgaagacgagggcttcactgtgcaccctgacaaagtgtttgtgcagagggctggcggccgccagttagttactggcatagtagtaaataggggcctttccgtcccgcgcgaggaactcagacgactgagagcggtgctgcacgccgcgaagaaaacgggactggaggcccaaaacagagacggtctgcctgacttccgcgcccaccttagaggtaagatcggctacgtaatgatggtggatcgcgagaaagggtcccagcttctgcgcgccttagaggcaactccaccctga

SEQ ID NO: 13809 - RNA, 1410 nt, synthetic construct
  source 1..1410: mol_type = other RNA
atgtctgctgaagagctcaggaagagagccatgaaaatcgttccctggcgcactccttggattggacgtgtggacgtgatccctccagcctctgatgagaggacttctctgatagatcgaggcctggttctgtccggttacttcacagaagaacagatcgcggagtttcatcgcattggggatctgtggctggaacacaaagatgccgcaactttcgctgcacagagagcccgggcccaagccaagctggatctggacgccctcaagaggcaaaaactggaggagaaggccgccaaaaagcaggctgctgcagcaaggagggccgctttacgagacgcaatcgcaaaaagacgggccgaggacattgtcttcctgggccggggatttagcgggaaactgggtgatcgaagatccgacgtggaggctctcgaaagagcggggctgccagtgctcagtacaccagcggacgtcgcacgtgcgttaggcgttcccatccccacattgagatggcttgcttttcacagtgaggccgcacagactatacactaccgtcagtttgaagtgcccaagaagaccgggggcgtgaggttactctcagccccaaggcctaaactagccgcggcccagagattcatcttggagtcgatcctggaaaaaattagccccggccccgatgcccatggctttgtctcagaacgcagcacagtcacaaacgctcgccctcacgtagggcgcgatgtcgtggttaacgtggacctgcgggacttcttcccgagcatacatttcccgagggtgaggggcctttttgagcagcttggctattcccctgcagcagccaccgtactcgcgctgttgaccaccgaagctcctaggcggagagtcacctacgctggagtggctcattgggtggccacaggcccaaggggtcttcctcagggagcctgcacgagcccagcaatctcaaatttggtcgctcgcaggttggacaagcggctgggagcaatggctacgaaacacggtggcgtgtatactagatatgccgatgatctgactattagtctcgagtctggccgcagagagcaaattggaatgctcctagcacgtgtacgacacatagctgaggatgagggctttaccgttcacccaaagaaagtggccgtacagcgggctgggggacgacaaaccgtcacaggaatcgtggtgaatcgggggctgtccgttccccgagaggaaattcggagactacgcgctgtgctccatgccgctaagaagaccggactggccgcccagaacagagacgacttgccggacttccgcgcacaccttcgggggaagattgcgtacgtcgcaatgatcgatcgggacaagggtgcccgccttttacaggccctggaacagacgcccccttga

SEQ ID NO: 13810 - RNA, 1653 nt, synthetic construct
  source 1..1653: mol_type = other RNA
atgctcagggtagccggattttgggactggctcaaaaaagcattttccgaccccgaagctccacctggcccgtctagctctgggtccactccaacaccaccaagtccagctcccagtggagcagcgcccgcaagtgctacttctacacccacatcgtccccgggcaagtcaaacgataaatcagctacgaaagggcgcaattacgatgctaaccctgaaattctgggactctctgaggccgagctgcgaaagcgagccttacgcataactccctggcgaaccgcctggattggacgggttgacacgatccctccccagagcgacgagcgcactgccattatagatcgtggcctgattcttacagggagactcacagaagcagaggtggccgagatccatgaggtgggcgatctctggctgaagtaccatgggagggtggagttggctaggagcgaggcaaaaaaggcgtcccaacgcgccgccgatcaaatcgccgcagacagggaggcactgaagaagcagaagaaagaggaggctgccgcacgtaagaaagccagagctgaagccatcctggaccggaaacagaatgacatcgtgtacctgggtaggagtgtaagcgctagaatgaacgacaggcgcgccaacgtggaaaaattacaccagctgggacttcccgtgttggccacacctaaggatgtggcgcagttgctggagatttccgtccctaagcttagatggctcagctttcacgcagtagccaccgaacgaccccactacatttcatttcacgtgaagaagcggagcggagggttgcgcctactaagcgctccgcataaagagctgaaaaaggcccagaagcggatcgccacacagatcttggataaggtggatcctggcccagtcgctcacggtttcattaaggctcggtcaacagtgactaacgccacccctcatgttggtcaggacgtggtcctcaatctcgacctctctgatttctttcctagcgtcacattcccccgggttcgcggcctgttccagtcctttggctattcacccgcggttgccaccgtccttgccctgttagcaactgaaagtcctcgccgaactgttaagtacgacaacagaacctatcatgtggctgtgggtgagcgtgcccttccgcaaggagcacccacgtcgccagctatagcgaatctggtagctcgaaagctggatagacggctcagtgggttggcgagaagcgccggatggtcttatactagatacgcagacgatttgaccctgtctacccggggcgaagctcgcaagaagaccccctggatgtatcggcaagtccgcgaaataatctcctcagagggcttcgtcgtgcaccctaagaaaggcaggttacagaggaaagggggctgtcagaccgtgaccggtgtggtcgtgaatcataaactgggcctgccaagacgggaagttagaaggctgagagcgatccttcacggtgctaaaaagtccgggctagcatcccagaatagggaaggaagggccgacttcccagcataccttaggggaaagctggcatatcttgccatggtcgaccctcaaaaaggcaaaaaaatgctcgccgaactggataccctggaggggcgtcaccggccagagtga

SEQ ID NO: 13811 - RNA, 1644 nt, synthetic construct
  source 1..1644: mol_type = other RNA
atggctggtttctgggatcgcctgaagcagctattcggtgacggaccgagtccaaaaggctctgaccctgatgctgggccaccttcatcatctaggagcccatctagggatggggacccagtgcctccagcctcgagcaaggcaggtgcccagagccctgaaaagggtcagaagagtcccgcaagatcctatgacgcaaaccctgagattttagggctgagcgaaagcgacctgcggaagagagccctgcggatcacaccgtggagaactgcctggatcgggcgggtcgacacaattccccctcaaagtgacgaacggacggccatcattgatcgaggtctgatccttaccggcaggttgtccgaggcggagatagccgagattcatgaggtcggcgatctctggctcaagcaccatggaaaagccgacttggccagggccgaggcaaaaaaagccagctccgcggccatcgctgagctgcatgctgaacgcgaggccaagcgcaagcagaagaaagaagaagccgcggaacgcagaagactgagggccgacggcattgccgaacgaaggcgaactgatatcatcttcgcagggagatctgtgtccagccgactggccgatcggagggctaacgtcgaaaaattagtggcactgggcctgcccgttctggcaactcccagggatgtagcagagctgctgggaatttccgtttccaagctgcggtggctcgcctttcacgctgaggcaactgagcgcccccactacgtgacatttcacgtcaagaagagatctggcggattgcggctcctttctgccccacataaagagctcaaacgggcgcagaagaagattgccacgcagatccttgatcgccttgatgtgggccccgctgctcatggcttcgtgaaagggcggagtacagtgtccaatgcaaaaatacacctggggcaggatgtggtcctgaacctagacctttcagacttttttccaacaatctcctttccaagagtaaggggcctatttcaatcgtttggatattctccggccgcagcaacccttctcgcactggttgcgacagaggcacccagacgagtgataaaatacgaagggagagcctaccacgtcgctaccggtccccgagctctacctcaaggtgcgcctacctcacccgctctggccaatctcgccgctcgcaagttagacagacgcttgctcggcctggctaaatcagctggatgggtatactcacgttacgctgacgacctcaccttcagcactaagggggagccccgcaagaaaactccatgggttttcaggcaaatttccgagattgtgagtagcgaaggattcgtggtgcacccccgtaagcggcgtgttcagcataaggggggaaggcagaccgtgaccggagtcgtggtaaacgagaaactcgggttgcctcgggatgaagtgagacgtcttcgcgcaatactccacggagcgaaaaagaatggcttggcttctcagaatcgtgacggccggagtgacttcccagcctatctgcgaggcaagttggcttatctggccatgatcgatcccggcaggggcaagaaaatgttacgcgaactggatgttatcgagggaaggaaacctgccccgacctga

SEQ ID NO: 13812 - RNA, 918 nt, synthetic construct
  source 1..918: mol_type = other RNA
atggcattccacgccgaggcagctacacgaacacattatgtccgatttaccgtaaagaaacggagtggaggcgagagacagttagccgcgccgcaccagaagcttaaggccgtgcagaggcaaatcctgcagaaaatcctggagcgtttagacccagggccctatgcccacgggttcgtcaaacagcggtcaaccgtgacaaacgcccaggcacacttggcacggcatgacctgataaacctggatatctccgacttcttcccaactatccattggcggagggttcggggattatttaagtcatttggctacagccccgctgttgccacaattctagctctgctcgtgacggaggctcccagaaccctcgccgagtacgatggcaagaaatattgggtggccattggtgaacgcgtcctgcctcagggtgcaccgactagccctgcaatctctaatctggtcagtcggaggttggacctccgcctagccggtttggccaaaaagagagggtggcgctacactcgctacgctgatgatctcacttttagcgctggcgaaaaaaagcgcccagacatcccatggatgatgcgacaagctaaggaaatactggccgctgagggctttgttctccaccccaataaacagagggtacaaaggaagggacgtagacagaccgtgacgggcattgtggtgaatcaaaagctttctgttcccagagaagaggtcaggaagctgagggccattcttcacggggcacagaagaccggacttgccgcccagaacagagagaacctgcctcatttccctgcatggctgcgtggcaagttggcgtatctctccatggtggacccagcgaaaggaaaaaaaatgctggcgcagctggatgctctcgaagggagacgccccacccctgtgtga

SEQ ID NO: 13813 - RNA, 1638 nt, synthetic construct
  source 1..1638: mol_type = other RNA
atgtggttgtatcatcccgagggagtggaccctcgcggaactggtaaagccccagccgctgttttaccaccgagcccaaaggctgcttccacaactgggacagctggatcgaccacctctgctacaacggcatccaataacagttctagcactgggggttggaagccacctgccgaacgagctaatgacggcgaccccttcgacactgccggaacactgacgctgactcccgagcagctgcacgaacgggccaaaaagatcgttccctggcgcaccgcttggattggccgtgtggatgtgatccctcccgccagcgatgagagaactgcacttatagatcggggcctggtgcttcgcggcttactgacccaggaggatatcgacgagatccatcggattggagatttgtggctcctacacaaggacgccgatagaatggcctcaacacttgcccacaaatcagccgaagcagccattcaggcaaggcggcgggaaagggcagaaaggaaggcacaaaagaaggccgaggctgccaaaaagaaagctgcccgcgatgctgctgttgcggaaagacgggctacagacctcttctttctaggagaaggcgtcagttcccagctgcacgacaggcgcaccgagatagagcgattagagacactggggttgcctatcttggcaactcccgcagatgttgcggcgcatctcggggtggaagttccacgcctgaggtttctggcattccatcaagaggcagcccagactactcactatgtgcagttcgaggtacctaagagatcagggggcacccgtacattagcagcccctaaaccaggcatcgccgcagcacaagagaggattctggagacgatcttagccaaactcccactggatgaggctgcacatgggtttgtcaccggacgaagtactgtaacaaatgcaaggcctcaccagggcagggaccttgtgataaacctagacctgaaagactttttcccgtctgtgacatttccacgggtacgtgggctcttccggagtttcggctatagccccgcggtcgccaccatattggcccttctctgcacggaatccccgcgcagagagctatcttacgacggacgatcctaccaggtggccgtgggtgccagagctcttcctcaaggcgcctgtacttcacccgccattagcaacctcgtcgcgagaaagctcgatagacgactgaggggactggccgccaaacacgggcttgcctataccagatacgcagatgatctcaccttcagcgcggatgccgacaagcgaggcgaactgggtatgaccttggctcgcctgaggcacgtgatcgaggacgagggatttgctctgaatcccaagaaggtcagagtgcagcgcaagggtggtcgccagaccgtcacagggattgtagtcaacgagcctaccaaactggggctgccccgtgaagaagtgagacggctgagggcaatcctccatgccgccaaaacaacgggtctgcaggctcagaacagagcgggccatccggactttcgggcgcacttggccggcaagattgcctacctcgcgatgatcgacccagctcgggctcgtaccctgagggaagctctggcagcttgcaccggctga

SEQ ID NO: 13814 - RNA, 1191 nt, synthetic construct
  source 1..1191: mol_type = other RNA
cccagcgacaatcccccatctgaacggggactgaaagctgaacagcgtgaagccgcccggcgcaaagaagccagagaagaagcacagcgtgaggcaaggctagcccgtgtggaagccaggcgagagagggaagctgccctcagacaaagactcgcacgcgaggtcttgtatgccggtgagggcgtatctgcgacagtcgcccacgctgcttcagatgtggcacggctggaagccggaggcctaccagttgctcactccgcccttgacctggcccaccttttggggctggacttgcctgcgctcaggtggctgacattccatcgcgaggtggccagaagcacccactacagacagtaccaggtggcaaagaggcgaggagggttcaggaccatttcggccccgaggcctaagctaaaggcggccttacgtgctgtgcgggagcggatactggggaggctggctgtgtctcctcaggcacaggcttttgttccaggacgctccactctgactaacgctcgccctcaccttagggccgctgtggtcgtgaaactcgacgtcgtggacttctttggctccttttccttccctagagttcgcggctggtttcgagctagaggctacagtgggatggtcagtaccctgctcgccctgcttacaactgaggcacccagggtggaagtggagctggacggggctcgatattacgtagcgacagggccacgcgttttaccccaaggtgcgcccacttcaccggagctgacgaacctgctcgcattgcggcttgacagacgcctcgccgcctatggtgccaagcatggatggacgtatacacggtacgcagatgatctaacatttagccgagcggatgaaccagagggttgtgtgagccggctgttgggcaccgcagaggctatccttcgggacgaaggcttgcgactcaaccacgataagcagtgcgtgacccggcgaggacgtcagcaaagggtcaccggcatcgtcgttaatgaggtggcaggcctgcctagaagagatctccggaccttccgggctgccgtgcatagagttactagagacggattcaaggatgtgcatgagcgccagcgcatgctgggctatgccagttacgtacgcatggtaaaacccgccttaggggagagatggctggaggcactgagggaggtcaggtcatga

SEQ ID NO: 13815 - RNA, 1185 nt, synthetic construct
  source 1..1185: mol_type = other RNA
atgaccgaaggccctcggaagtcggttagggttgaggccgaagaggccgcaaggagggctgaagccagagaggaagcaaggagggctgcaaggttggcccgtgcagctgcagtcagagctcggagagccacgcatgcagctcgcctcacgcgagaggttctgcacgccggtgaaggggtgagtgctaggcttccagccgcgaggagcgatgctgcagctctcgagcggagaggactgcccgtaatgcacgacgccgccgatctggctacactgcttggcatggacatgcgggctctgcggtggctaacctatcaccgcgacgtcgcaactgtgacacactacaggcaattccaagtgcccaaagccaaaggcggtgtgcgcaccattagcgcaccaagaccggccttaagagcggctcagcaggcaatacgacagcacgtgctggcacgcctggaacccactgttcacgcacaggccttcgtgcgggggcgatctactctgaccaacgcccggcctcatttgcgtgctgccgtgctggtcaaagccgatatccgggactttttcggggcaattgactttccccgggtgagaggtctatttgaggctctggggtattctgggatggtggccaccctccttggcctgctcaccacagaggcgaggcgtgtcgaggccgacttggatgggcagccagcttgggtggctgtcggaccacgagctctgcctcagggagctcctacatccccagagctgactaatcaaatcgcgagacgcttagatgcgcgcctcgctggatacgcccgcagacatggttgggtgtacaccagatatgctgacgatctggccttttcatcccaggatggagcccgagagagggtgggtcgactgctaggggtcgtgagggcagcgcttgagggcgaaggcttccaactgaacccggataagctcgtagtcgtaagaagaggacgccagcagcgcgtcacaggcgttgttacaaatgacgtggccggcctccccagagccactttaaggcggttccgggccgcggtgcatagagttacccgtgcaggatttgccgaccccgcagaacgcgcccgtatgttgggctacgccagttatgtcaagatggtaaagcctgcccttggcgagaggtggttgcgagcgctccgcgaagtgcctgcctga

SEQ ID NO: 13816 - RNA, 1287 nt, synthetic construct
  source 1..1287: mol_type = other RNA
atgtcttggttcgcatctacactagcgtggtttaagcgttggactagagcaaagccagtcactcgggacgtgtcaggactggacgcgccaactggccgggatggaagaccccttgatgtggttagcgaaactgtacgcctaagtgggccgctgaagcccggacatctgaggcagattaagcgggaccccagactcctgcctaaaggcaaacgagtgtatgcacgaaatctgaagcggtggatgggtgccggagaagcaagacgcttcttcagtaggtcaatgctgacccgggataggtccgtgcgggatctcttaccggatgaagcccagttggctcgttacggcttgcctgtctggcgaaccgaggaggatgttgccgctgccttgggcgttactgtgggcaggttgcggcattatgcaagccaccgaccacgagagcgagtgcgccactatgtgacattcacagtgccgaagcgctctgggggcgttagatgggtgcacgcccccaagcgcagactgaaaaccctgcagcggcgtcttctcatgctcctggtcgctaaactccccgtgtccgcccatgctcacgggtttgtgaccgggagaagtgtgcggacaggtgccgctccacacgttggaagacgcgtcgttctcaagctggacctgaaagacttcttcccaagcgtgaccctacctagagtccgtggcctgctcttggctttgggctatgggtaccccgtcgccgccacactggcattgctgatgaccgaggccgagagacagcccgtagaagtggacggtaccgtgtttcacgttcctgtaagcgcgcgtgtctgtgtccagggggcacctactagcccaggggtgtgcaacgcagtccttcttcgccttgacaggaggctcgccggcttagccaaacgatacggctacgcttacacaaggtacgccgacgatctgacgttttccggagacgatctgggagccttagaacgcgtacgcgccctggctgctagatacatccaggacgagggctttacggttaaccgcgacaagaccagggtccaacgcagaggcggagctcaaagggtaacgggtgtgacagtgaatgctgggctcggattatcacgggaggaaaggaggaggctgagagccatgatacatcaggaggggcgggatggtgcagacgcagagaggtcggcgtatatcgatggaatgcttgcctatgtgaaaatgctcaaccctgagcatgcggaaaaactgtctaggggcagaaagcggcggggttcctga

SEQ ID NO: 13817 - RNA, 1287 nt, synthetic construct
  source 1..1287: mol_type = other RNA
atgtcctggctggactctactttatcatggctgaaggcccgattcacgcgtcccgtgactagatccaccaccggattggatgctcccgtggatgctcaagggcggcgtgtagacgtcgtctcggaaaccgttgtgatgtccggccctctcaagccaggccatctcagacagattcatcgggacgcgaggttactgccgaagccccaaaggagatatacacctggccgggcaaagtggatgccagctgccgaggccagacgcttgttttctggaacgctgaggacgcgcaaccgaaacctgcgcgatctgctcccggatgaggcacagcttgctcggtacgggctacctgtttggcggaccgaagaggacgttgccgccgcattaggcatatctgtcggtatgctccggcattattccatccaccgatcacgggaaagggtccggcactacgtgacttttgctgtccccaaaagaactggcggagtaagactgctgcacgcgcctaaacgcaggttgaaggccctgcagcgcaaactgctggaggtgctcgtctcaaagctgccagtgagtcagcaggctcacggctttgtgtccggccggagcatcaaaacaggtgcccagccccatgttggtaggcgggttgttcttaagctggacctaaaagacttcttcccgagcgtgactagtgctcgagtgcgaggactgttcatcgcattaggctacggatatgccgttgcagcgaccttggccgtgctgttgacagaaagcgagcgccagcctgtagatattgaaggtacagtctttcacgtgcccgtgggcccaagggtttgtgtacagggcgccccaacttcacccgccctttgcaatgccgtgctcatgaggctggaccgacggcttgctggactcgctcgacgctacgggtatacttataccagatacgctgatgatctgaccttctctggcgacgatctgagcgccctggagagagtacgggcactagccgcacgttacgtgcaggaagaagggtttaccgtgaaccgcgacaaaacaagggtcagacgtagggggggagctcaacgtgtgaccggagtcacagtgaatgcaacactgggacttagcagagaggagaggagacggcttcgcgccatgctccaccaagaggggagggatggcgaagacagtacccgcagagcatacctcgacgggatgctcgcgtatgtgaagatgttgaatccagagcaggcagccagacttgtgcgcaagaggaaacctagggccggtgggtga

SEQ ID NO: 13818 - RNA, 1281 nt, synthetic construct
  source 1..1281: mol_type = other RNA
atgagctggttcgattccactctgggctggtttaagggactgttcacacccaagcccgtaacgcgggacgtgtccagacttgatggatcggcacgagatgcttctggtcgtgcagccgacgtggtgcgcgaaacagtggcaacaagcgggccattgaaacccggtcatcggcgcgagattatccgggatgcacgtctcttaccaaaagggcgccgagtgtacacccctgggcgcaaaccgctcatgacccgaggagaagctcgccggttttttagcacaaccttccggaccaggaacagagacgtccgggacttgctcaccgatgaggcgcagctgactcggtacgggctgcctgtctggaggactgaggaagacgtcgccgccgcactggagctcacagttgggcagctgcggcattatgccacccacagaatccgcgaacgcgtctcccactacgtgacttttagtgtgccaaagaggtctggcggcaccagacttctgcacgctcccaagcgcaagttgaaagcactgcagcgcaggctgcttactctgcttgtagccaagctgccccggtccgagcacgcacatggcttcgtgagtgggcgatctattaaaacaggtgcggctccccacgttggaagaagggtggtcctaaagctggacgtgaaggattttttcccatcagtgactgtaggccgagtacgcgggctcctccttgccttgggatatggataccctgtcgctgctacgctcgccgtcctcatgacggaggcagaaagacagcccgtggaagtggagggcactgttttccacgtcccagttggtccgagggcgtgtgttcagggagcccctaccagccctggcttatgcaacgctgttgtgatgaggttggacaggcggttggccggtctggcgagaaggtatggatacacatatacccgttacgctgacgatctgactttttcaggggatgacgtcggcgctctagagaaggtgagggccctggcggccagatatgtacgtgatgaaggcttcgaggtcaatgcagccaaaacccgagtgcagaggagagggggcagacaaagagtgacaggcgtgaccgttaatgccggattaggcctttcaagggaggagcggcggaaactgagggccatgatacatcaggaggatggtggcgacgctaaacaaagagcacgcatcgacggaatgctagcctacgtgaagatgctgaaccctgaacatgccgcccgactcgctaggcgtagaaagccacgggggtga

SEQ ID NO: 13819 - RNA, 1281 nt, synthetic construct
  source 1..1281: mol_type = other RNA
atgagctggctggattggttcaagggtctgttcagcccgaagccagttaccagagatgtgtctcgactagacgcccccttcgaaagggatgcttctgacagaccgcctgatgttgtgcgggagacagtggccacaagtggtccacttaagccggggcacctccgacagatcctgcgtgacgcaagactgctgccaaaaggcaagcgcgtatacacaaagaagcggaagcgactcttttccgcactggaggcccggcgtttctttagtaccgcattccggacccgcaatagaaatgtcagagacttactgcctgatgaagctcagctcgccaggtatgggctgccagtgtggcgcactgaggaggatgtcgcgacagcccttgggctgtccgtcggacagttgcggcactactcaactcatcgggcacgcgaaagagtaagccactatgtcacattcactgttcccaagaggtccggcgggcagcggttgttacacgcaccaaagcgcaagctcaaagccattcagcgaagactgttggacgtgttggttagcaagctgcccgtatcagaacaggcacatggatttgtgactgggcgtagcataaaaactggagccgctccacatgtgggcaaaagggtggtgctgaaattggatctaaaagactttttcccctctgtgacagtgtcacgggtaagaggactactccttgcctttgggtatggttaccccgttgcggccacactcgccgtgctgatgacggaggctgagcgccaaagggtcgatgtcgagggaaccgtctttcacgtccccgttggtcctagggtgtgtgtgcaaggtgctcctacgtcgcctggcctctgcaatgctgtcctgaccagattagaccgtcggctggccggattgggcagaaggtatggctatgcttacacgcgctacgccgatgatcttactttttctggggacgacgtgggcgccctggagaaagtcagggcattagcagcgcgctatgtacgcgaagaggggttcgaagtgaacgctgagaaaaccagggtgcagagaaaggggggacggcaacgagtgaccggcgttaccgtgaacgagggtctgggcctcagtcgagaagagcgtcggaaactgcgggccatgattcaccaggaagatcgcgacggcggcgacgctaaaaggtccgctagaatcgacggcatgcttgcgtacgttggaatgctcaaccctgaacatgccaccaggcttgcacgatacaggaagccccgcggcggatga

SEQ ID NO: 13820 - RNA, 1296 nt, synthetic construct
  source 1..1296: mol_type = other RNA
atgggcagctggctgagacgagtgtttgggcctggagccgaatctccatccggggactcatcaggggctgacagggcagatagagccggaccagccacagctagtgcagcagcagcggcaggaacacgtaggggtggtcctctgcggccaaatcagagacgggaagccgtgcgggatgaacggctcctgccaaaacccgaaccaagacgcccttggcgagctcccaagtcacggcctattattcctgccgacgctggcgcccgtctattcagcgactccctgcgcacacggaatagagaattgcgaacgctggccaccgatcccgcacagttggctaggcacggtctgcccatctgggatacagaacgggacgttgccgacgctctcggcatcagccttggggagcttcgccatcacgccattcatagaagacgggagagggtggaacactatgtcacctacgccatcgctaagcggagtggcggacagcggattatccatgcaccgaagacccgcctaaaagccattttacgcaagttgcatggggccctggtcggcaaactccctgtgtctgagcacgcacacgggtttgtggctggcagatccgtacgaacaggcgccgctatccatgtgggcaagagagtggtcctgcgattggacctcagagagttcttcccaactgttaccgccgcgcgcgtaagggggtatctcatagcgctgggctatggataccccgtggctgccactctcgcactgttgaccacagagcccccccgccaaagggtcgatatcgacgggaccatttttcatgtgccggtgggcccaaggacttgcgtacagggagctcccactagccccggtctgtgtaacgcgatacttcacaaactggatagacggatagcagggctggcacggagagcaggattcgcctacactcgttacgccgacgacctgaccctgtcgggagatgaccttgacaccgctcaccgcctgcgcagacgggtagagagggtgatcagagaggagggctttgaggtcaaccctgccaagacgcgagtcatgacaggacgcggtgcccagcgcgttactggagtcacggtgaatcgagttcttgggttatctaggcgcgaacggaggcagatccgtgcgatggtgcactgcggcgatccagatagggcgaggcaggtggagggtttactcgcctgggttgagatgctcaacccggcccaagctgatgccttgcgtagggctccccgtaaaccacctgctaggccgggcgcacgacctgatagatga

SEQ ID NO: 13821 - RNA, 1323 nt, synthetic construct
  source 1..1323: mol_type = other RNA
atgtctttcttcagcaccctccgagcctggatgggctcgctcttcggagaaaagcctgtgacaagagaggtgactcgactctcctctgaaccagaaactcctagtgctaaacaggggcccacaaaaacagtcctcggaagagccaaggataccgttgtggagaaggttgtgatgaccggtcccctgaaggaaaagcacagaaggctcttaaagcgggacgcaagactcctgcctaaaccttcacgtaagaggaggtgggagaagcgcgagaaggtgatgtcccaggctgaagcacgtagactgttcgcgggcaccctgaggactagaaatagaaaccatagagatctcctgcccgacgaggagcagttagtacgctatgggctacccgtctggcgcacagaggaagacgtggcccaagctcttggtctgacagtgcgccggctgcgtcacttttctatacatagggaacgcgacccggtcagccattacatcaccttcgcggtgccgaaaaggagtggcgggcaacggctgattcacgcacccaaaagtggacttaaggctgtccagcggaagcttttgtcccttttagtggagaagttgcccgtgagtccacatgcccacggctttgtaaaggggagatctgtccggacgggtgcagagggtcacgtagggaaagcagtggtactccggttagacctgaaagatttctttcctaccgtgacatacgccagggttcgcggcctatttatcgccctggggtatggatttcccgtggcagcgacattggctgttctaatgactgaatccgagaggcagccagttgaggccgagggcaaggtgtattttgtacctgtgggcccacgagtttgtgtgcaaggggccccaaccagccctgctctttgcaacgctgtcgtcttgaaattggatcgtaggctggcaggactggccagaaaacacgggttcacatacagccggtacgccgacgacctgtccttttcaggaccaagcgaggaaactgcagagcgcctgcgggctctggccaaaaagattattgaggaagagggcttccaggtcaacgccgccaagaccagactgcagagaaggggcggaaggcagactgttacgggagtgactgtcaatcaggtgttgggcctgagccgaaaggagcgtcggaaacttcgcgcgatgatccatcaggaaacctcacgaccagcagatgccgaacggagcgctcggatcgatggcaaactggcctatctctcaatgctgaatccccaacaggctgaagccctccgcacccgacgcaaaggtaggacgtcttga

SEQ ID NO: 13822 - RNA, 1302 nt, synthetic construct
  source 1..1302: mol_type = other RNA
atgtccctattccccaaattgctaacatgggtgaagactgtgttcggacaaggcccacggacacgccaggtgacccgactttcaagcgcaaatggaggccctgtcgacgcctcaggcagacctgttgacgtagtgacagaggaggtggtgctcaaagggccactcaaggaaaaacaccgccggctggtcaagagagatcccaggctgctccctaagcccccacgcaagtcacattgggaaaagcgaaagaaggtgatgagcgcggaggaagcaaatcgtctcttctccgggactcttcgtaccagaaacagaaatttgagggacctacttcccgacgaggctcaacttgagagatatggcctgccggtgtggagatccgagcaagatgtagctactgctttggggatcaccgttcggcagctgcgtcacttttctgttcataggcagcgagatcgggtgagccactatgtcactttcgctctccctaagagatcgggaggccagcgactcatacacgctccgaagaaagggctgaaagccgttcagcggaagttactgagcttactcgtcgaaaagctgccagttagtcctcttgcccatggttttgtcaaaggcagatctgtgcggactggcgctgaaggtcacgtggggaaagctgtggtcttgcgggttgatctcaaggatttttttcccagtgtgagttacgcccgggtgagaggtctgctgattgcacttgggtatggctatcccgtggcagccaccctggcagtcctgatgacagagtctgagaggcagccggtggaggtcgatggccaggtattctttgtgccaataggaccccgcgtgtgtgttcagggcgcacctacctcacctgggctgtgcaacgcggtagttctgcgaatggataggcgcttagctggactggcccgcaagcacggtttcacatactccaggtacgccgacgacctcagcttctccggacccgaacagaagacagctgagaaattgagagccttggcggggaaaatcatcgccgaggagggctttcaggtgaacgcgcctaagacgaggctgcagagacgaggcggacgccaaaccgtcaccggagtaactgtcaaccaggtgctggggctgtctcgcaaagaacggaggaaaatgcgcgccatgattcatcaggaggcttctcggccagcagacgccgaaaatagcgcccggattgacggaaagctggcctacctcagtatgttaaacccaaggcaagcagaagccctgcgcaccaggaggaaaggtcgtacgaggtga

SEQ ID NO: 13823 - RNA, 1311 nt, synthetic construct
  source 1..1311: mol_type = other RNA
atgtccctgtttgaccgcctctgggggtttttcaaaggcctgacaagtaaaccggtggaacgggatgtaacccggctgcctagccacgacgccaaagacggcagggctgcagacctgacgaaggaagtcgtgaggactagcggagagttgaagccgcaccatcgtcggctcatcaccagggaccaacggttgttgcctgatccctcacggaaggcacattggggccctcttggatacacggccaggaaaaaagtgttcgatgcatctgtggcaggccgactcttcgccggaactctgcgaacccgcaaccgcgaattgcggacactcgccactgatcctgcccagctcgagcgatacgggctgccaagatgggaggacgaggctaccctggcagccgctttaggtctgtctgtcaaccagctacgtcacctgtccacacacaggctccgggaaagggttccacattacgtagcttttgctatcgccaagcgcagtgggggtgagcgggtcatacatgcccccaaaaaaagactgaaggccgtacttcgcgcggtccacgcacaactggtgtccaagctaccagtccacccagccgcccacggtttcgtgaaagggagaagtgtcaaaactaacgccgaaggacatgtgggccgtgccgtcgttgtgaagctcgatctggaggactttttccccactgttacctaccagagggtaaggggactgcttgtaagcttaggctatggatatccggtggcagctacattagctgccttgatgaccgagtcggagagacagcccgttgagctggacggggaagtggttcacgttcccgttgggcccagagtgtgtgtccagggcgctcctacttcccctggcctttgcaacgccgtggtgagacgcatggacgcaaggctgtcaggactggccaagaagctaggtttcacctattcaagatatgctgatgatctggccttttctggcgatgaccctaagcaggtggacgtgcttattcacagagccacgcgcgtgatcgctacagaggggtttcgggttaatggtaagaagactagagtgatgcgacgaggagcggcgcagcgaattgctggcgtgacagtgaatgccaccttagggctgagccggaaggaaagaaggttgctcagggctgccgcccatcgcgaaaaaacctctacagtcgatgcgaaggagcaagcggtcctcaccggccaactagcttgggtgcagatgctgaatccaagccaggcagaggcacttagacggaggcgtgctcgcgcaattggtccacccgcatga

SEQ ID NO: 13824 - RNA, 1296 nt, synthetic construct
  source 1..1296: mol_type = other RNA
atgaattggctgcgacggttctttgcctggctgtttggcccaaaacaggtcacacgggacgttgcgcgcctaccggaccattctggcggaagggctcccgacgtgctgaaggaagtggtccaaacagggggcccggttaaaccaaactaccgaaggctcgccgttcgagatgccagactgcttccagatcgttcgcgcaagggagggtggactggattggcttggcgcgccccaacctctgtaatgacagggaaggagtcaaggcggctattttctaactccctgcgcacgcgcaaccgcaatttacggaccctggccacagatgaaaaacagcttgcacgctacggcctgcctctgtggaggacagaaacggagctggccgctgctcttaatctgtccattgagcaactccgtcatttcagcatccacagggtgcgtgatagagtccctcattacgtagcgtttgccatacctaagagaagtggcggtgaaagagtcatccacgcacccaaaaagaaactcaaagcagtgctgcggaatgtcaacgatcaacttgtgtcaagacttcccgtgcacgcggcagcccatggatttgtaaagggacgtagcgttaagaccaacgccgagcctcacgtcgggagagctgtggttgtgaagctcgatctggaagacttctttcccaccgtcacttgggctcgcgtgaggggactgttgatcagcctgggttatggctatcccgtcgctgcagccttggccagcttgatgaccgagtccgaaagacagcccgtgactgtagacgggcagacgttccacgtgcccgtgggagatcgggtgtgtgtacagggtgccccaacctctccaggcctctgcaatgccgtgacccggaaaatggacgcacggttgtccgggttgagtaagaagctcggcttcacttactccagatatgccgacgacctcacgttcagcggcgacgacgctaagcagattgaaaccttactgaacagggctactagaattatccacaccgagggcttcgttgtgaatgggaagaaaaccagagtgatgaggagtggaaacagccagaaggttgctggggtcacagtcaatgaaacactgggcctaagtcggaaagagcgacgcaaaataagggctgcactccaccaggcaacccctgagaagagggcccagctggagggtacacttgcctgggtgcatatgttaaaccctgagcaagcagcaaagctcaaagccgatgcggtgcgagcgcctacttcaccaggtcccactactacatga

SEQ ID NO: 13825 - RNA, 1305 nt, synthetic construct
  source 1..1305: mol_type = other RNA
atgacttggctcatcgcacttatggtcctggccggcgtgttcgtgttgctccgagccttggcccgaaaaaagcaaaacgccattcacacaatcgagcctggcctcacccaggacgagcctacaagcgattccgcatccggagggtcaaagtcacagcttgaacctaaaactacgcagagcctccgtaagcagacaattgatgaaagattactccccaaagccccttctaggggcccccatcatccacgcagcagactcttcgatgcagcctcggcgaggcgccgattctctcacagtatgcgatgtaaaaatcgtgacctgagcgtgctggcagaggatcccgaacagttggctagacacggtctacccctatggcggaatgaggcccagctggccgaagcactggggctttcggtcgggcaactgcgccacctgagcatgcacaggatagcagagcgtaccccccactatatcactttctccattcccaaaagaagcggcggtaacaggctcattcaggctccgaagagaaaactgaaggccgctcagaaaaaggtcctgtcacttctgatccataagcttcccgttcacgaggccgcccacggatttagacagggacggtctatacgcaccggcgccgaaccccacgtacatagacgcgttgtcatccgtctggatatcaaagactttttcccgagtctaacattcgcacgaatacgcggctacctgattgcgatgggttatggttatgaggtggctactaccttggcctgcctttgctccgaaccacagaggcagccagttgaggtgggcggggagatcgttcatgtgccagttggccctagggtagctccacagggggctccaacatcacctggcttgttgaatgctatctgtcataagctggactgccggatgcagggactcgcgagagcacatggatttgcctacactcggtatgcggacgacctcacgtttagtggagactacccggatcgcgtggggaagatcctgtctcgggccagagccataatccggagcgagggatttgaagtgaatccaagtaagaccctcgtgatgaggcgcggcaaagctcaacgggtgactggtgtcaccgtgaacgagacattaggactgtccaggcaacagcggcgcctggtaagggcagcaattcaccaggcttcttttgtgtctcctatggacgggacgtccaaggcccggttactggggaaggtcgcttacattcagatgctgaaccagtcccaagctgagcctttaaggagacaaaccgaaaagctgacctga

SEQ ID NO: 13826 - RNA, 969 nt, synthetic construct
  source 1..969: mol_type = other RNA
atggggttcgtcgactggttgaaggggcttttccggccgaaacctctcatgcgggatgtttctaggctagaccgcgaaggcgggtcactggacgctgtccaggaggaggtccgtcctgagagtggaccactcaaacccgggcacctgagaaccgtaagaagggacccgcggttgctccctaagcccaaacccaagacacccctgcgggggaagcgcaagaaatggatggcagcctccgagagcaggcgactttttgctggcaccctgcgtacaagaaaccgccacatctcggacctgctgccagacgaagctcagctgcagaggctcggcctgccagtatggcgggatgaaggcgaagttgccgtggccctgggagtgagcgtgaaagagctgagattcttctcaatccacagggaggctgagcgagctccccattatgtctctttcagcatacctaagcgcaacggcggcaggcgcctcattatggcgccaaaacgccgcctgaaggcactgcagcgaaagctccttccacttttagtcgacaaactccctgtgagtggacacgcgcatggatttagagccggtaggtccatccgaaccggcgcagaacctcatgtcgggaaggctgttgtgctgaaaatggatctggctgactttttcccatccgtaacatacgttagagtgcgaggtttattgattgcactgggctatggatacaccgtcgcagccactcttgcagccctaatgactgaagccgagcggcaacccgtggaggtgaatggggtgagactgcatgtgcctgttggtcccagggcgtgtgtgcaaggagccccaacgtcccccggcttgtgcaatgccgtggtgcgtcggttagatctccgcttggccggtctagccaggaagcacggctttagctttactcggtacgctgatgatttgtgcttttctggagcacactggagaagatga

SEQ ID NO: 13827 - RNA, 1290 nt, synthetic construct
  source 1..1290: mol_type = other RNA
atgtctctgtggaggtggattaaaagttggtttggtgccgctcccacacgggatatcagtcgactagacacgactcgcagcgccagctctgcaaccggtgacgtcgaagaaagaatcgatatttctggcgggcctctgaaagagcatcaccggaggagagcattacgtgacccccgcttgctgcccaaaattaaatcaccagcccgccagcttgggttaactaagaagaaggctgtgatgtcgcagaccgaagcgaagcgcttattcggagggaccttgcgaacgcgaaatcggcagctgagggacctgttgcctgatgaggaacagctaaagaggttgaatctgcctctctggcgaacagaggacgatgtggcacaggctctcgggatcagccggcgtgagttatggttcttctcaatccacagagagcgtgagagaaggccccattacgtgactttctcacttccgaaacgatccggaggccagcggcttatacaagcaccaaaacgccgcctgaagtccatacagcggcgcctggtatctctcctggtaagccacctgcccgtgtccgaacacgcccatgcgtttcggccaggccgtagcatcaggacaggagccgaaccccatgttggccaccgcctgctgcttaaactcgacctgcaggagttctttccgagcgtgacttttgcaagagttcgaggcctcctcatttcctatgggtattcatatccagtggcaaccactctggccgtcctaatgacagaagcggagcgccaacccgtggaggtcgatggagaggtttttttcgtgccagtcgggccaagacattgtgttcagggggcccctacctctcctggcctgtgtaatgccttgctgctgagattagaccgtagattggccggcctggctaggaagcggcagctaacctacacgcgctacgctgacgacctcaccttttccggtgatcttgatcgggcccaggctgagtcacttagggcactcgccacccacttgatcgcttccgaaggattcactgttaacagtaagaagacaagaattatggccagcggagcccggcaatctgtcacaaacgtagtggtgaaccagacactgggtctgtcccggaaggagagaaggcggtggagagccagtgcccaccagctgagcagaaggcctgagagtgaacgcgcaggccttcgagcgcaactcgaaggcaggatcgcattcctccacatgctgaaccctaggcaagccgaggctctcgctagaaggctcccggctctgcagtga

SEQ ID NO: 13828 - RNA, 1275 nt, synthetic construct
  source 1..1275: mol_type = other RNA
atgggcctcctggattttattcgctccctgttcggacctcctaaaagggatatctcacggttaagcggagagacagtggccggggaggatgaggttgacgagagagtggatgtgtccggcggactgctgaaggaacaccacagacgaagagccctcagggacccacgcttgcttcccaagcgtaagagtgtgggcagacagctgggcctggccaaacggaaacgagtcctttcagcagccgaagctgaacgcctttttagtgggacaatgagaaccagaaacagacggctgcgcgacctcctcgttgatcccgagcagctgaaaaggctcggtctgcctctctggaaaacggaagaggaagtggcagccgcccttgggatctctttgagggaactgtggttttttgcaattcatcgtgagcgggagacacagcctcactatgtgacatttgcgatccccaaaagaagcggcggcaaaagaaccattatggccccaaagcgacgacttaaggctatccagcgcaaactgctgggccttctagtggagaagctccctgtctctgaacatgcacacgccttccggaggggacactctgtcagaactggggcggaaccacatgtgggcaagaggatggtactcaagttagacctgaaggatttcttcccgtcagtgaccatggcccgtgtacgcgggttgctgatagcgtgtggatacagctacccggtagcgaccaccctcgctgtgctcatgaccgaggccgaacggcagctggtttctgtggaggccgaggtcttccatgtgcccgtagggccacggcattgcgtgcaaggagcacccacttcccctggtctgtgcaacgccctggttctgcgcctagacaggcggttggctggtctagctcgcaagcggggcttggcctatactagatatgcagatgacttgacttttagtggagagttcgaccgcgccgcagcacaacaattcaggcaggttgcgtccaggataattagcgaggaaggcttcaccgtgaatacagcaaagacacgtcttatgggtcgaggagctcgccagtcggttaccggggtggtcgtcaatagcgtcctggggttatcccggcagaggcggaggcagttacgcgctatggcacaccgtctcaaactagctcaacgggccggtacggccgagggaactgaactggctcgatttgctggccacatggcctacctggctatgttgaaccccagacaggctgccaggatcccagtggtcgactga

SEQ ID NO: 13829 - RNA, 1266 nt, synthetic construct
  source 1..1266: mol_type = other RNA
atgagcctcctggcctggctgaagcgcctctttggccgcgaagtgaggagggacgtggcccaacttgaacgcggcgaggtggatgccgttgcagagactgtcgacctgacgggtccccctctgaggccacatggccaacgacgagcatggagggatcggcgcctagtccctaagaggaggtccttagggcgggccctgcgactaaccaaacggcagcccctgttaagcaggacagaagcagatcggctgttttccggaagcgcgagaactcgggacagacagcttcgcgatttagctcccgatgaagaacagctcagaaggtatgggctccccgtatggcggacagagcaggagctggccaacgctctagaactcaccctgggccagttgcggcatttcgctatccatagagagcgggaaagacagccccattacttcacttttgcaatacctaagagatcaggcggcgagcgtcacatcctggctccgaaaaggcgactcaaagccctacagcgccggcttttggagcagctgttcgcaagactccccgttggcgagccagctcacggattccgcagaggcagaagtgtgcgtacagcagccgaaccgcatgtagggcagcgacgcctgctgcaactcgacctgcaggacttttttccatcgctgacctttggaagggtccggggattgctgattgggtatggatatgggttcccagttgccaatgccctcgcccttttggtaacggagtgcgtgcgccagcctgtggagatagacggtgagatctttcacgtgcctgttggtctgagacacgctgtgcaaggggctcctaccagtcccgcgatcgccaacgcgttggtcctccgacttgatcgtcggctggccgggttagctcgcaggttccgttgtcgctacactagatacgctgacgacctgactttctccggagagttagacgctgccgcagctcagcaactgcgtcgcttggccggccacattattaggtctgagggtttcgcggtgaacgccgccaagacaagatcagcaggaccgggcgcacgacacgaagtcaccggtgtgaccgtgaacgaagtcttggggctttctcgggaagagaggcggtgcctcagggcagcagctcacagattgcaccgtgagcctgataatgccgaactggccgcaaggctgcacggacaactggcgtacctgcatatgcttaatccagcccaggctgagcggctccgacagagacttccaacaagatga

SEQ ID NO: 13830 - RNA, 1287 nt, synthetic construct
  source 1..1287: mol_type = other RNA
atgagtctgttcgattggatccgccagcggctattgggaggagccagaagacgtgacgtcagcagactcgagtcgggggacgacgctctagatagcgtgacagaactggtggctgtcagggggggacccctcaaaccaggtcatcgccgactcgctctccgggatcctcgtcttctgccaaaaccgccgagagcccctgtcaggcttggtaagcgaaagaagaaccctttcctagctaccgctgaggcctctaggctgttctcagagagcctcttaactcgcaaccgcggtctacgcgatcttgcaactgacgaggctcagcttaccagactgggcttgccactctggcggacggagtccgagatagcaaccgccctgggcttgactgtcggccagcttagacacttttccatccaccgcgaaagagagcggaccccccactatgtaacattcgccattcccaagcggggcgggggtgaaagactcataatggccccgaaaaggcgcctcaaggccattcagcggacgctgctggcccagctcgttgacaagctgcctgtgacagaacacgctcacgggtttcggagggggcgatcaatccgaacaggggccgaaccccatgtaggacgtcgcgtggttatgcatttagacctgaaggacttctttccatccgtgacatttgcaagggtgcgcggctacttagtcgcgtgcggatacggctatcctgttgcgactactcttgccttgttaatgactgaggctgcacggcagcctgtgtcaattgagggtgaaatattccacgtgcccaccggactgcggcattgcgttcaaggggcgcccacgtctccagccttgtgtaatgctattgccgccaaactggacaggcgcttggcaggactggcaaggaagtttggcgtcgcttacactaggtatgcggatgacctgaccttctctggggatctggatgccaaaatcaccggccggctgcttcatcatgtgggcgccattatccaggcagaggggtttacaatcaacagtgctaagacccgaatcctgcaccgtggccggcgacaaagcgtaaccggagtcacagtgaacaaagatgcaggactgtcccgtactgagagaagagtgctgagggccacagcccacagactcaccaccctcaggagagaaggtgcgcctgacgcagccgcagaaagggtgttggctggccagctggcatacctggctatgctgaatccagcccaggcagctgccgttcggaataggcaaggccccgtgtga

SEQ ID NO: 13831 - RNA, 1428 nt, synthetic construct
  source 1..1428: mol_type = other RNA
atgagggtggaatttttcatcttgagaatctggacccgtatagcagctgggctctctagactgccaagatgggcaaaaatccccatctggatcgtcctcgccatattaatggtcctcgtgcttgtgattggtggcctgttggccaccgtttttggactgattagaggcattctgttccggattttcccaccaccccccagtcgcgatgttagccggctggacatggatggggccgagttagatgctattcgtgagactatcgaggacgaaggaaaaccccttcgggagtctcaccggcgtttaatctacagggaccctaggctgttgccaaagccgaagcctcctgccgatgtttggcccaggcctaaacgcaagagagtgatgcaggtagaggaggcatcacggcttttttccggaacactacgcacgaaagaccggaatattcgcgatctcttggcagacgaggagcaactcgagcgtcacaggctgcctagctggcagaccgaaagtgatctggctgacgccctggggctcacaatgggacaactgcgccattacagcatacatagagagtcagagacagctcggcactacgtacagttcgctatacccaagaggaacgggagacaacgcatcatcatggctcccaaaacaagactgaagggcatccagaggcagctcaatgagcagctggtccagcgccttccagtatccccgcacgcgcatggctttaggaagggtaggtccgtcaggactggagctgaaccgcatgttggccgcaaggtgctgttgaaaatggatctcaaggacttctttcccagcgttacatttgggcgagtccggggtctacttattagcctcggctatagttaccctatagccactacattggccgtgctcatgacggaagctgagagacaacctgtgcagcttgaggatcggttagtccatgtgcccgttggccacaggtactgtgtgcagggtgcccctacttccccaggcttgtgcaacgcaatttgtctgcgaatggatcgccgtctagccgggctggcacgcaaatatgggtggtcttatacccggtatgccgacgacctgaccttcagtggcgacgacgaatctgccctgtgcgatatccggcggctggcaagacagatttgccgagacgaaggattcgaagtgcaccccgaaaagacccgagtcatgcggcaaggccgcaagcagactgtgacgggggtgactgtaaatgaagtggccggactcagcagaaaggaaaggcgaagactgagagcggctatccacaggctgaaacacccatcacctgatcgaccagcgtcgatgaccgagtcccaggtgcgaggtcacctggcgtggctacatatgcttaacccagagcaggccgagaggctgcgcgaacagtggacctcatga

SEQ ID NO: 13832 - RNA, 1266 nt, synthetic construct
  source 1..1266: mol_type = other RNA
atgtcctggtggtctagcctctgggagcgtttgacagcctggtggcggggtgaacccactaggtccgtagcaagaattggcggagatgctgacgtcgatcaggttgtcgagacagtgaggctcagcggaacactgaccgagcatggccgacgccgcgttcttcgagatcccaagctgctgccgaaaccgaaaactgccggatggagcatgggtaagcggcctcgcatcctgactagagacgaagcctataggctgtttggcgggacccttcgtactcgcaaccgagagatcagggatctgctaccagacccagaccagctgcagcggcatggcttgccacatttggcctcagaagttgagctcgccgccctgctggacgtgtcactaactgagctcagatttttcagtattcacagagtagctgagcgccagccccaccacgtggtctttcggataccaaagcggggggggggcttcagaacgattaccgccccaaaacgcagactgcgaaccgttcagagaagactgctggcccgccttgtcgacctccttcctgtctctgacgcagcgcacgggtttcggaaagggaggagcgtggctacccatgctgccccacacgttggcaggaaggtggtggttaaactggatctcgaggatttcttccacacagtgacatggcagcgggtacgaggttacctaatcgcaatgggctatggctaccccgtagcgaccaccatcgcggtgctggtgacggaagctgaaaggcagcctgtggacctgggcgacagagtcgttcacgtgcctgtgggacccaggaggtgtgtgcaaggcgcacctacctcgcctgcactgtgcaatgctatcgcacacaagctcgatcgacgtttattgggcgcagcccgcgcactcggttttacatatactcggtacgccgatgatcttaccttctccggggatgacgccactagagtgtctgctcttttgggattagtgcgtaagattgtggtcggcgaaggtttccggctgaatgacgctaagaccagggtgatgagggcaggagggcgccaacgtgttacgggagtgacagtgaaccaagtcctcggcgtgagtcggcgcgagagaagacgagtccgggctatgatccatcagcatggaggtgatcccgcctggcgcgacaggatagcgggacaattagggtgggtcggggccgtaaaccctgaacaggctggaacattgcgggccaggtggaaaagaggcgggggttga

SEQ ID NO: 13833 - RNA, 1257 nt, synthetic construct
  source 1..1257: mol_type = other RNA
atggctctgtttcgatggatagcagataaactgtttggacctcctaagcgagatttgagccgccttgaaaataacgatgtggacctggtggacgagagtgttgatctgagcggtggccctctcaaacccggccaccatcggaagtccctgagggacagaagactgctgcccaaacgcaaggcctcgggtctgtcacccctgaagcgggtgaaactcttctcaaaggaacagagcgataggctcttctcacggaccatgcgcacaagcaatcggaacgtccgcgaccttaccgaagacgaggatcaactccatcgatatgggttgccgctctggaagtccgaacatgacctagcgtctgccctctccctctccgtaaaggagttacgccatttcagtattcaccgatttcaggataaggtgtgtcactatgtgctcttcagaatcgccaaggcacgcgggggccatagattaataatggccccaaagactaggctcaaaaaaatccaacgtgaattgttgcgtcaggtattggaaaaactgcccccacctcctcatgctcacggatttgtcaagggaaggagtgtgaaaacaggggcctcccagcacgttggaaaaaaggtggtcgtcaaaatggacttagcagacttcttcccgtcagtaacctttcccagagttaggggcctatttatcgctctgggctacagctttcccgttgctactactctcgcagtcctgtgcaccgaatgcgagcgtcaacgcgttaagcagggagatgaccttttccatgtgccagtgggagagaggcactgcgtgcaaggtgccccaacgtcccctgccttatgtaaccagatcgccagaaagctggacaatcggctgcacgggctcgctctgaaactcggatttacgtacactagatacgccgatgatcttacattctctggcgacaaccccgaaaagctgaagagtctgctgggcctaaccagaaaaattattgaggacgagggcttcaggcttcattctaagaagacacgcatccttcactctggtgggcaccagcacgtgacaggcgtgaccgtcaatcaggctctggggttgtctaagaaagagcggaggcggttgcgggcggagttacaccagctgagcctgaatcagcagccagatccacaacagattgcacgactgaaagggaaactggcataccttgagatgctaaacccggagcaggccgcgagacttagggctaagtatcctctgtga

SEQ ID NO: 13834 - RNA, 1359 nt, synthetic construct
  source 1..1359: mol_type = other RNA
atgtctggtttcgttactttcatcgccgtaatcctcggggtcattgtgtacacctatttaaagcgcgccaatgctcgaagaaagcacaaaagggtcgtggaggaatttaagaaagcccccgtgcgggatgtgtcaacggtggctggagagggggacgcaggcttgaagacagagactatacagattggcgggcctctcaaaccaaaccacaagcgtctggcgctccgggacgatcgcgttttgccaaagccacccctggggccagattattactcgaaatggcccagaccccctaggccaaagtacttctctgaacgggatgctgaccgcttgttcggcccgtctctccgaacctccgctagagatgtaatggaccttgcgaccgatgaggctcagctcaatcgttacggccttccactgtggcggacagaagctgaagctgcagccgctctggggattcctcacgctcagttcaggtatttttcccagcacagacatagggaacacatctcccactatgtggccttcgctataccgaagaggagcggcggggaacggattattcatgcacctaagactaaactgaaagcagttctgcgtacactggacaagctgctcgttagcaaactgccggtgagtgaccatgcgcatggattcgtgcgaggtaggagtattgccacaaacgccaagcctcacgtgggaaagccaatggtcgctaagtttgatatcaaggactgctttcctacgcttactgtcaaccgcgttcgcgggctgctactggccttaggttattcataccctgtggcagcggccttagccgtcctgatgaccgagcctcccagacaactagtggaggcagagggaaacatctaccataccccaatagggccccgcgtatgcgtccaaggtgcacctacttcccccggtctttgtaatgccatcttgctgcggttggatcgacgtctcgccggattagccaaaaaacgaggcttggcgtacaccagatatgccgacgatatgaccttttctggccccgaggcagagatcaagaaacttctcggaatcgtgcccaaaattgtcagcgaggaggggtttgagctaaacaccgaaaaaacacgcctgatgcggcaaagtggcaggcaggttgtggccggagtcacggtgaataaagacatgggactcagccgcaaagcaagaaggaagctgcgggcagccatccatcacaattcacagggcaagcttgatgtaactgctgccgccagactggaaggcaagctgggatacctccacatgctgaacgtggaccaggcccggagactgagagaaggcagggacggcacagcagctcagcagaggtga

SEQ ID NO: 13835 - RNA, 1344 nt, synthetic construct
  source 1..1344: mol_type = other RNA
atgacaggcatcttacggctcctggtgttcataggtctttttgtggccgtttactacggatataaggcttatcaacgctggagacataagcagacggtgaaggagtttaaaaaagcccccgtgagagatgtgagcactgtggccggtgagggggtcgcatcactgaagaccgagaagatcaacattggaggcctgctgaagcctaaccataggcgtctggcccttcgcgacgaacggctacttccaaagccgcccttggggcccgattactatagcaaatggcctcgacccccaaaacctaaatacctctcagaaaatgatgccgatcgactgttcagtccttcccttaggactagcgttcgagacgccatggatttagcaactgacgaggcccagctcaagcgctacggtctgcccctgtggaagaacgaggctgatgtagccaacgcactgaggattagtcagggtcagttcagatacttctctcaacacaggcatagggaacagacaccacactacgtagcctttgccataccgaaacgcaacggcgaagagcgaattatccacgcgccaaaaaccaaactgaaagcagttctgcgggcgctcgacaagcagctcgtctctaaactccccgtttcagaacacgctcatggatttgtgaagggccgttccatcgctactaatgctcgccctcacgtggggaaacccatggttgctaaatttgacattaaggattgcttccccacaatcaccatgggcagggtgcggggtttgttgctcgccctcggctatagctaccctgtggctgccgcattagccgtcgtcatgacagaggcgcggcgacaaccggtagaagctgaggggaaattgtaccacacccccacaggacctcgcgtgtgcgtccaaggagctccaacctcgccaggcctgtgtaacgccatcctgctcagaatggaccgccgtttggccggactggcaaagaagcgggggctagcgtatacaagatatgccgatgacttaaccttctctggacctcagggagagatcaagaaacttctggggctggtgcccaaggtagccgcagaggaaggctttgcaattaatcacgacaagaccagactgatgagacagtccggcaggcaggcaattacgggcgtgatagtgaataaagatatggggctctcccggaaggtcaggaggaagctgcgggcagcccttcatcaccagaagctggggaaggccgacccagctaatactgacagactgaagggcaagctcgcttatctaaatatgctgaaccctgctcaggcgaaaagattgaaagacgtctacgcaccactttga

SEQ ID NO: 13836 - RNA, 1359 nt, synthetic construct
  source 1..1359: mol_type = other RNA
atgcctcacctcacttacctgcagataggagtcttactgctgatcgtgggtctgttattgactcggggggcacgccgatggcttgtattgcggcgatggagcaaagccccacagagggacgtgtctgctctcgccaccacaggggaagcgcagtttaaaggggaggccatcacgactgcaggtccattgcggccaggccatcgcagactcgttctgagagataaaaggctcctccctaagcctcctcccgaccctgccattcttagacgctggcccaggccacctaaaccaaaatacctgacagaacaggaagcggacagactatttagtccgagtttgagaacgagcaatcggaacgtcatggatctagctaccgacgaggcacagctacagcgatatggacttccggtctggaactctgaggatgatgtggcctctgccctgtccttatccctggggcagctccgtcacttatcacagcatagacaccgcgaaacagccccacactatattacctttgccatccctaagcgttctgggggcgagaggctgatctttgcccccaagcggcggctgaaagcagtgctcagaactttggaccgcttgctggtgtgtaagctgcctaagtcggaacacgcccatgggttcgttcggaagaggtccgtcgcaaccaatgctgctccccatgttgggaaggctgtcctcctgcactttgacataaaggactgcttccccaccattcatttcggccgcgtgagaggtctgctgatcgcactgggctatagctaccccgtagccgcaaccctcgctgttctgatgacagaggctccccggcaaccagtagcagctgagggcaagctgtaccacgtacccactggacccagggtgtgcgtgcaaggtgctcccacctcaccaggcctctgtaacgctatcctgctccgcctcgacaggaggctgtcaggactcgcaagtaagtatggatttggctatacgcgatacgccgatgatctggccttcagcggcgatgacgccaccaaagtggcacggttactgaaacttgttcccgcgattgtggccgccgaaggattcgcggtgaacccggtcaaaacaagagtgatgcgtgccggacagagacaagccgtgaccggcgtcattgtgaataaagccatgggcctttcccgtcaggagcgacgcaagttgcgcgctgctctgcatcagcaaggcacagcaggtgcggacccgggagatgagttgcggcttcacggaaagcttgcatacctgttcatgctgaataagcttcaagccgctgctctaggctggaggcaggggatgaggcctactctgacaaacccaccttga

SEQ ID NO: 13837 - RNA, 1344 nt, synthetic construct
  source 1..1344: mol_type = other RNA
atgactcacctcgccgcgctggtgttagcctacttccttgttgtgggcatacggaccgcttggagaaaccggaaacgcaaacaggcggagaagaagtgggcccaggctccccagagagacgtgtctgccgtcgctgacgtcggccaagctgagttcaagcaggagatcatcaagacctctgggaccctgaagccaaaccacagacggttgatactgcgggacaacagactcttgccaaaggctcctccagacccgaagcaaaggagatggcctcccccccctagaactaaatatcttacggaacatgaagcggaccgactttttgggccctcacttcggacgcgtaatcgcgacgtcatggatctggccattgatgaggcacagctggaacgctatggactcccagtctggaagaccgaggatgaggttgctgccgctctctccctgacccctggtaagctgaggtacttctcccagcacaggttccgtgaaactgctagtcactatgtgacctttgccattcccaaaaggtccggcggggaaaggcttattcatgccccaaaacgtcagttgaaggccgtgttacggcgcctcaatacattgctggtgagcaagctccctgtgagtaaacacgcccacggcttcctccagggacggtcagtggcaacaaacgccgccccgcatgtgggcaaagccgtagtcctgcatttcgatatcaaggattgctttcccagcatccattacgggagagtgaggggtttgttgatagcactggggtattcttacccggtcgcggccgctctagcagtcctaatgacagaatcccccaggcagcctgttgttgcagagggaaagacttatcaggtgccaatcgggccccgcgtgtgcattcaaggagcacccacctctccaggcttatgtaatgccatcctgctccgactcgatcaccggctagcgggtttagcccgaaaacacggctttgcttacacacgatatgcagacgatctaacgtttagcggaaacgacactaaaaagattgctaagctgcttaaactggtgcctcagattatcttcgaagagggatttgcagcaaatactaagaaaacccgcgttatgagagcaggacgccgccaagccgtaacaggcgtggtagttaacaaggatatgggtctgagccggcaagagaggcggaacctgcgtgctgctctccatcgacagaatacatcacctaatacaaatccaagggaaaggatgagactggagggcaagctggcatacctgtacatgctgaaccgcgaccaagcttcggccctggggtggaaaaaacctgccagaagtgtatga

SEQ ID NO: 13838 - RNA, 1341 nt, synthetic construct
  source 1..1341: mol_type = other RNA
atgagcagctttctgttcgccatcgccgccatagcagccgtcattgtctggcagcgaagaaaagagattgtgcggacactgaggtggaaacaccaacccatccgcaatgtagcagcgctggccgtcaccgacgatgcgagtgttgccgaggaagtcatcacgaccgccggaccccttaaaccacagcaccggcggcttattctgcgcgacaagcgactgttacctaagccccccctcaaattcgatagatacgtatggccacgcccgaagcagcctagggtgttcactaaagcagaggccggcaggctctttagcgccactctgcgaactcgcgacagaaacatccgcgacctggcaacagaccctgaacaactagcaagatatggcctccccatatgggaatccgaggctgacctggccgctgctttgagcatttctgtgggccagctccatcattactccatccatcgtgagcgggagcgggcatcccactatgtgtgtttcgccgttcggaaacgtggagggggcgagaggctcatttacgccccaaaaaggaggctgaaagaattgcagagacgcctgcacgatctcttggtgcgcatgctccccgtgagtgctcacgctcacggatttgtccctggccggtctatcgctaccaatgcagcaccgcacgtagccaaggccgtcgttcttaagtttgacattaaggattgctttccaaccattcattttggcagagtaagaggcctgctattagcttacgggtattcttatcccctggcaacaaccctggccgtgctaatgacagaggcgcctcgacagcccttcgagatcggaggagctctctactacgtgcctgtgggccccagagtgtgtgtgcagggtgctcctacatcacctgggctgtgcaatgctgtcatgttgaagctggaccgtaggcttgcgggtctggctaaggcgaacggattcgcatatactaggtatgccgacgatttgacttttagcggcgataaggaggaagctgtggataggctcttagcctgggttccgaggatcgctgaagccgaggggttcgccctgaatgcctcaaaaacgcggataatgcgccgggggggtaggcaaacagttacaggtgttatcgtgaataagtcagcggggttgtctcggcaagagcgcagacgagtgagagcagaaatacatagattgtcccagagtgctacggctccagaaaacggagccacccagcgcttacggggcaagcttgcctacctgaacatgcttaacccactgaccactgcaccactccttgcagctttcgcccgactgtcggggcgtacctga

SEQ ID NO: 13839 - RNA, 1287 nt, synthetic construct
  source 1..1287: mol_type = other RNA
atgggactgattgactggctgcgggcactagtgggcaaacccaggcaggttcggcgcaacgtcagcacaatagctgcaacttccggcgctgcccctgctgaacaaacggaggaaatcgtccagactgaaccacagccgatgaaaccactgcatcgcaggcttaccttccgcgacgctaggttgctgccgaagcccaaaagaaagtcaggacagttcacttggccacggcttaagaaaaagagatatatgcaggcggatgaagcatgcagacttttcagcaccgccctgcgcacgagggacagatctatccgggatctcgctacggacaaggcacagctcagtagatatgggttgcctgtatggcataccgagcaggacatcgcagctgcgctggctctgacaccaaagcaactccagcactactcgatccatcgttgcagggagacaagcccccactatgtggcctttgccgtgcctaaaagaggaggcgggcatcggattattcacgctcccaagcgcagacttaaagccatacagcgaaaactcaacgagctcctcgttgagatgctgcctatctcctcttacgcccatgggtttgtcaagggtcggagtattgcaacaaacgctaaatctcacgttggaaaggccgtcgtgctcaagtttgaccttaaggattgctttccttccatacacttcgggagagtgcgcgggctactgattgccttgggttacggttatcccgtagccgcgacacttgcagtgttgatgacagaggcacctagacagcccgtggaggtcgatggccgcctctatcacgtgccgaccggacctcgtgtttgtgttcaaggcgcccccacctcaccaggcctgtgtaatgccgtcctcgtgaggatggaccgacgtttgggcgggctggctaggaagtacggcttcgcctactcccgctacgccgacgatctgaccttcagcggtaacgataccgcagctgtacgccccctgctgggcattgtcccacgaatcgtgcaggaagagggctttactatcaacagcggaaaaactcagatccgacgtcggggacggcgacaaagagtgactggcgtgatcgtgaatgaatgtgccggcctgagtcgccgagagaggaggagattaagggccgcgatacacaatcagcagaggcacggggcggaagggaaatcacggaggcggctaggagggaagttagcctacctgaagatgctgaatcctacccaagcaggtccattaattgccgcctttcggtctgcttga

SEQ ID NO: 13840 - RNA, 1290 nt, synthetic construct
  source 1..1290: mol_type = other RNA
atgcccggcggcaatcctgtaggcctgctggattggctggccagttggttcggtggacggaggcgctacagggatgtgtcaggcctggccgaagccgatgcagacttgacccgggaaagagttgacacaggaggcggcccactaaagccacagcacctccgccaagcggttcgggatgccagactccttcccaagcctcagcccactgcaggaatgtgggtgccgggccaaaaaaagaaagtcatgtcacagcgggaggcagacaggctgttttccgccacctttcggacctgcaatcgaaacctgcgagatttaaccacagacgaggagcagttgaggagatacggactgcctgtgtggaaatcagaagccgatgtggctcgcgctctgcagatatctgaggggcagctgagacattatagtatccatcgccaaagagagacaagcccacactacgtgacattcgctctcaacaagcggcgtggcggtcaccgcttgattcacgctcctaaacggcgcctgaagcaactccaaagaacgctggacgctcttctggtcaagaagctgcccgtgtctactttcgcccacggctttcgcgcaggcagatctgtcgcatccaacgctaggcagcatgtcgggaaagctatcgtgatcaaactggacctccaggattgtttcccaagcatccattttgggcgtgtacgcgggctgcttgtggcactggggtattcgtatcctgtgtccactactctcgccgtggtgatgaccgagagtccgagacagcctgtagccgccgaagggaaaatttaccacgtgcccgtcgggcctagagtctgtgtacagggagcgccaacgagccccggactttgcaatgcagttctcatgcgattggaccgccgactggccggattagctggcaagcacgggttcaccttcacccgatatgcggacgacttgacatttagcggtgacgatccggccaagatcaagttgctcctgacaattgctgcctgcattgttagggaggaaggatttcggctaaacccacagaaaacccgtgttcttcggcagggcgccaggcaacgcgttactggtgtcgtggtgaacgaccagcccggactttccagaactgagcgtaggaagttaagggcagcaatacatagactggacccagctgatgaggcagcctgtcggcgaatcgaaggtaaactcgcctacttacagatgttgaatcccgatcaggcggcccctctaaggtctgcgttcgtggctgctcggggtagggggtga

SEQ ID NO: 13841 - RNA, 1275 nt, synthetic construct
  source 1..1275: mol_type = other RNA
atgggcttatggaactggcttaagacttggctgcgaccacaccccatcacacggaatatcgctaacctcgacggcgatcaagcacagtcagtgaccgaggtggtggataccagcggaggcccattgaagcctcatcatcagcgtcttgctgttcgcgatgtgagattcctcccgaagcctcagcgcccatcttccttaccgtcttggagccgtcctgcgaagcccgtcgtgttctccaagtcagacgccgaacgttttttctccgcatctcagcgcacaaaaaaccggcagctgcgagacttagccagcgataccgaccaactgcagcaatacgggttgcccgaatggaactccgaagatgaggtagccgccgccctgggtctgacggttagtcagcttcgccattacagcatccacaggcagagagagactagccctcactacgtgatgtttgccgtgcccaaaaggcaggggggacataggatcattcatgctcctaaaagacgcctgaaaaagatccagaggatgctgctagctgaactcgtcagtaaactgcccgtcagtgagtttgcccacggcttccgcagacagaggtcagtcgcaaccaatgctacccatcatgtgggcaaggccgtggtgatcaaacttgacctggcagactgttttccctctctgcactttgggcgggtgagaggcctcctcattgccttgggatatagctacgtagtggcaacaactctggcgatcgtaatgaccgaagcgattcggcagtcagtcgaggccgagggtaagatctattatgtccctgtgggacatcggttttgcgttcaaggtgcccctacatcgccagggctgtgcaatgcgatattgatgaggctcgaccgcagactggcaggactcgctgctaaacacggtttccagtattccaggtacgcagacgatctgacgttcagtggagatcaccccgcaaaagccccctatctggtcgcccttgccgggaagattattcgagacgagggcttccgggtaaacagaaagaagactcgagtcttgaggccatctcgtcggcagcagataacaggggttgttgtgaatcaacacgttggcctctccagaactgtgagacgccgactgagggccgctatccaccaacttagcgccaatgatgtgcacgctcggaaccagattattggcaaaatagcttacctgcggatgctaaacccagatcaagccgcaccactccaggcggctctagacgcaaagttgcagaattga

SEQ ID NO: 13842 - RNA, 1281 nt, synthetic construct
  source 1..1281: mol_type = other RNA
atgtcctttctgaactggcttacaagtctgttcaaacccaaacctcctgctcggaacataagcggattagcaggcactgacgccatcgaggtggaggaacacgttgacctgtccgggggacctctcaaaccaaagcagctgcgactggcgacccaagacaaacggctcttgcctaaggctaaaaaggctatcgatccacgcaattgggtgccgaggaaaaagcctaagatcatgccccgggaagaagccgacaggaggttttctgaatccttgcggacatccaataggaaaatttcaactctggcctctgatgtcgaacagttggagagatatggactccccatttggaatagcgaggccgatatcgccgctgcactggaaatgtctacctcccaattaagacacttctcaattcaccgccaacgagagacatcgccccactatgttaccttcgcgattagaaaacgcacaggtggtcatcggctgattcacgccccgaagactagactgaaacgaatccagcgccaacttaacgagctcctggtgtcgcgcctccccgtaagtgacgctgctcatggattccgcgcccagagaagcgtcgccactaatgcagagccacacgtgggaaagcaggttgtcatcaagctcgatcttgctgattgctttccaaccatacattacggtcgggtgcgaggcatgctcatcagtctggggtactcatatgaggtggctgcggtgctcagcctgctctgcactgaggccgagagacagcctgtagctgccgacggcaagacctacttcgttccgatagggccaagggtatgtgtccagggtgcacccacctcacctggcctatgtaatgccgtgctgctgcgtatggaccggagactcgcaggccttgccaagaaatttgactttcagtacacgcgctacgccgacgacctgacacttagcggggacgatgcttctaaggctaaggtcctgattaggcttgccaaggaaatcgtgcaggatgaagggttcagattaaacagcaaaaagacccgtgtcgtccgccatggccagaggcaaagggtggcaggagtggtggtaaacgaccagaaagggttgtctcggacggagcggcgaaagctgcgtgcagcaattcatcagctggatcccgctgatgagaaaagtgcaaggcacttgaggggcaaggttgcctatctggcgatgctatccgaacagcaggcggccccattaagagcagccttggccgtgaagctaagcggcgatgcatga

SEQ ID NO: 13843 - RNA, 1302 nt, synthetic construct
  source 1..1302: mol_type = other RNA
atgtcctttctggactggctcaagtccctatttaggccgaaaccggcgacacgaatcgttgctgggctcagcgctgcagacacatcagccgacgcagccaaggtgcgagaggtggtggacacctctggcggtcctctcaagcccggacactgccgtagagcactgcgcgatagtaggcttctacccaaaccgaaacctaagtctcaggggtacgtgtggccaaggccacccaagcctaaatatctggaccggtccgaagcggaccgactgttctcaacaaccctcagatgcagggatcggaatttacgggatctcctgcctgatcccgagcagttagatcgctacgggctacccctctggcagaccgaagccgatcttgccgaggccctcggcatctcagtcggcatgcttaggcactactcactgcaccggatcagggagacgacaccccattatgtaacctttgccattcctaaaagatctggaggtgaaaggttgatccacgcaccaaagcggcggctcaaggctattcaacggagactgcatgagcttctcgtctcccgcttacccgtttccgcagccgcacacggattcaggtcgggtcgctcggttgctactaacgcgcacccccatataaacaaggccgtgctgatcaaactggacctgaaggattgcttcccaagcatccatttcggccgagtgcggggcttgcttgtggctctgggatatggctatcaggttgccactgtcctggccgtgctcatgactgagccccctaggcagcccgtagagattgacggaaagcttgtctacgtgcctgttgggcctcgttcttgtgtccagggcgcaccaacatccccagggttgtgtaacgccgtcctgttgaggcttgatcggcgcctggcaggtttggccagaaagtacggatttgcctacaccagatatgcggatgatttgacatttagcggggacgacacggctaaaataaagctgatgattaccctgagtagcaaaattgttagagaagaagggttcagcctgaaccggcaaaaaacccgtgtgctgagacgaagtcgccgccaaactgtagccggtgtggtggtcaattctactgtaggcctcagccgtagagatagacgccgcttaagggccgagatccaccagctgtctcaggctgctaagccaccagacagtcacagagtgcagcgactggcaggcaaactcgcgtacctacatatgctgaatgctgaccaagccgctcctctgctggtgcagttcgctcggttgggagacggcagctga

SEQ ID NO: 13844 - RNA, 1323 nt, synthetic construct
  source 1..1323: mol_type = other RNA
atgcccctccctgccgtgcgtccagtaacaggcacccccccttcccatagcacattgcctgcccttgagcgtgctcggccagcacagccacagaccctccaacctccacccactcctcagctgcagcgcgctccaacccctcctccacaagctagtgaaccccaggaggccggcgtcgaacagtctcagcacagacgactggctgtgcgagacgagaggctggcccagaaactggtcaccactcagcatgcggtgactgctaggcggcccagtaagcggtctttccacagagatgaggcggccaggatgttttcatccactctgaggacgcagcggagaggaataagagacttggttaccgatgaacagcaactggtgagatacggcctgcccatttggcgaacagaggccgaactggcactggccttacaggtaggactcaaagcactcaggcattatacagtgcaccgcgcgcaggatagggtgctccactacgtgacgtttgctatccccaagcgctcaggcggcgaacggcttatcaccgcaccgaaaacccgccttaaggcgctccagagacgccttaacgctctactggtttcgaagctccccgtgagtgaatacgcccatggtttccggactgggcacagcgtgcttaccaatgcaaagccgcacgtgggaaaacaggtggtcctgcgtctggatatccatgagttctttcccagcatccacttcggacgggtgagaggcctgtttttggccctcggttacgggtacccagtggccacagccctggctgtactgatgacggaggctccccgccagcccgttcagattggagaggtttgcttgtaccctccttgcggcccacgaacatgtccacaaggggcgccgacctcccctggtttatctaatgccctgcttgtccgcctggatcgtaggttggccggcctagccaaacaacgggggttctcctatacccggtatgctgacgacctgactttttcaggagacgacattgcagcagcacacgcgctaagactggctgcagcaagggtcgtcagggaagaaggcttcgagctaaatgttaagaagactcgtgttgccagaagagcaagccgacagctggtgaccggagtcatagtgaaccgcgtattggggctttcccggcagacacggaggaggttaagggccgccgtccaccagtatttacaagcccatgccgctggtgctgccgatccacgaacactggcaagactcgacgggcgcatcgcctatctctctatgctcaacagcgagcaagctagacgcttgactatggactga

SEQ ID NO: 13845 - RNA, 1260 nt, synthetic construct
  source 1..1260: mol_type = other RNA
atgggattttttagctggatttggcggttactgggattcgccccccggaggaacgtgagcagattggacaccggggacgaagacgtggtacaggaagtcgtggacctcagcggcgatcccttcaaagaacaccaccggagaagggcgttacgcgacggcagactgttgccgaagagacgccagcacacgttctgggggtctaggaagaggtacctgagtaaagaagaagctgataggctgttttccgacacaatgaggacctgcgataggaaaatacgagatctcctgccagatgaagaacaacttgctcgctatgggctgcccccatggcggacagaggaggatctcgcaagagcattgggccttacactgaagcagttgactttctacgcacttcaccgggagcgagagcgtttctgccattacgtttcctacgcacgcccaaagaggaacggtggagagcgtatcattatggcgccgaaacgccgtctgaaagagctgcagcggaagcttgtcgacgacctagtgcggcatctgcccgtgtcggagcatgcccatggctttcgcgagggccgctcagtgaaaactaacgccgagccacacgtgcgcaagactgtggttgtcaagtttgatctaaaggactttttcccctccgtacacgtcgggagagtgcgaggctacttaatatctctgggctatgggtatcctgttgccaccagtatggccgtcctgatgactgaggcagaacggcaaccagtcgaaatcgatggcgaacggtacttcgtgcctgtgacctctcgatattgcgtgcagggtgcccctacgtctcctggcatctgtaatgccatcttgctcaaactcgatagacgactagccggtcttgccaggtccctggagttcgcttatacaagatacgctgatgacctcactttttcaggcaatgacgtgggagcggtcgagcgcctcagaaaatcagtgcagcggatcgtccacgacgagggattcagggtaaatagcgaaaagacccgggttatgaaaagaggtgcctgtcagagagtgacaggagtggttgtaaacgatggagttgggctgagtcgtaaggagcgaaggagactgcgcgctatggcccatcagctgcggcaaagcgcaaacggtgaagagtccaaggccgcaaggctgcgcggaaagattgcttatctcaggatgcttaatcctacccaggctggggctattgagcgacactggtcaaatcgtgggtga

SEQ ID NO: 13846 - RNA, 1260 nt, synthetic construct
  source 1..1260: mol_type = other RNA
atgtcgctgtgggactggataaaagagagactgttcggtgtcccaccttcccgggatgtgtcacggctcgaacccggatctggacagcgggacgccgttacagaagccgtagacacaggagggggccctctaaagcctggccataggcgcagggcgatcagagacagacggctgttccctaaggcacgcacccctattggcaggaggccacgggtgatgaaacctcacgaggccagacgactctttagcgcttccctccttaccaggaataggagcatccgcgatctggctccggacgaggagcagctaaaaaggtatggcctgccactgtggcggacagaggacgatttggcacgggcgctcgaacttagtctcggccagctccgatggctatcaattcaccgggagcgcgaaagttgcccccactatgtgacattcgcaattcctaaggccacgggcggagagcgactcataatggcaccaaaacggagactgaggagggtgcagcggagactgcacgaacttctggtcagcaggctgcccgtatctcctcaagcccacggtttccgtccccgccgttccgttaagaccggagccgagcagcacctgggtaagccgatcgttcttcatctggacctcgcggatttttttccaactctggcttggcatcgggtgcgaggccttttgatcgcttacggctatagctatccagtggccactgtcctggccttattaatgacggaggccgagagacagccggtcgaggttgatggaaagctgtttcatgtgcccgtttcaccccgatactgtcccccaggagctcccacatctcccgggttggggaacgctctgctgctgagattggatagacggcttatcgggcttgcacgcaagttcggcttcgcatacactcgctacgccgatgacttaaccttttctggggaagccgagcgcaaaattgcttacgggctagtgtgccgtgtccgtgaggtagtcgaagctgaaggtttcagtctgaatgacaggaaaacccgatttatgggaagcggtagacgccagactgtgaccggggtggtcgtgaatcgcgtgctcggcttgtccaggaacgaacgcagaagattgagggcagccctccatcaacaccggggggaacccgatccgcaattgctgggcaagctggcctacctgtggatgctcaaccctcagcaggccatggcgttatggcctgctgactggccacgtccaagacgagcacgctga

SEQ ID NO: 13847 - RNA, 1251 nt, synthetic construct
  source 1..1251: mol_type = other RNA
atgagcctgtggaaatggctgagttcaaagttgactggcaagccgcccagaagagacgtctctcgtttggaatcggaagacgaagaccaagtatctgaggcagtagatgtgtccggcggaccactgaagccagaccatcggcgccgcgctctaagagatcggaggctattaccaaaagctcagccaccggttcggtttggcaagaagaaacggctgatgagtaaagcagaggcccagagactgtttggagcctcaatgagaacccgcaatagaacactgagggaccttctcccagatgtcgagcaactgacacggtatggtctgccagtgtggaagactgaggaggaactcgccacagccctcgggctgacccagagacagctgtggtttttcgccttacaccgcgagaaggagagggcggcccactatgtgacatttgctatccctaaaaggggtggcggcgagagacacattatggcccccaaacgtcgcctgaaggctttgcagcggaaactgctcggtctacttgtcgaaaaactgcctgtgcatgaggcagcccacggattccgcaaaggacggtccataaaaagcggcgcagcattgcacgttggtaagaagctggtacttaaggtggatctcaaagacttctttcccaccgttaccttccctagggttcgcggcttgctgattgcttacgggtacgggtatcctgtggccaccgctctcgccctgctgatgacagagagcgtgcgacagcctgtggaagtagagggcaagctttaccacgtcccagtcggaccccgacattcagtgcagggagcccctacctctcccggcttgtccaacgcgctcgtccttaggatggaccggcggctgactggacttgctcggaagttcggttttgtgtacacgcgatatgcggatgacttagcattcagcggggatcatgatcacaagaccggttgggggttactgcagagagcccgtcgaatcatcgccgaagaagggttcgccgtgcaccccgacaagactgtgttgatggggagcggcaggagacagtccgttactggcgtggtcgtgaacaggacgctggggagatctcgccaacagaggcgaaggctccgcgcagcactccatcgtcgaagacaggctgaggctcggctcaggggacagctagccttcctctggatgcttaatcccgctcaagcatccgcgctgtggcctgaagagtggaagaaaccccaaagttga

SEQ ID NO: 13848 - RNA, 1221 nt, synthetic construct
  source 1..1221: mol_type = other RNA
atgtcctggctggattggctcaaacaaaagctgctgggcattccgcctcagcgcgacatctcacggctggaaggctcaagtgaggaggttcgggaacaggtggatgtcagcggcggtcccctcaagcctaaacaccgcaggcgcgcacttcgagacaggagactcctgcccaaggcaagagcccctttgggaaaacgcccaaaacagatgagtcatagccaggctcagcggctattttccgcctctcagagaactcgcaatcgacagcagagggatttgttgtgtgatcccgaacagttgcagaggctcggcttgccagggtggcgcaatgaggatgacctagcccactcccttgggcttacactccggcagctctggtcttacagctattattgtcaggccgagaacgctcctcactatgtggcttttgccgttgctaaacggagcggcggagagagaattatactggctcccaagcgtagactcaaggccttacagcggaagctgcttgatctactggcccagcatctccctgtgtcgccagctgcgcatggcttccgaaagggccgtaacacgcttagtaatgcacgggagcacgtcggccagaaagtcgtggtccgatttgacctgcaagacttcttcccccattgctcctggcagcgtgtaaggggactgttggtggcttatggctatagctttcctgttgcaacctgccttgcgctgcttatgaccgagagcgaaagacagccagtggaaaccccggccggactggtatacgttcctgtcaggcagcgatactgcgtgcaaggggcacccacttctcccgcactggcgaacgccctgacactcaagctggacagaaggctctcaggtctggccaggaaactggggtttcggtacacacgatacgcagacgacctgaccttcagttcatccgggttagcaaggctcggggtacttaagagagccgtgacagccatcgttgaagccgagggtttccggttgaatgattctaagacccgcgtgatgcggcaaggtcgtcggcagacggtgactggggtggtcgtgaaccaggtcgccggcttatccagacaacagcgcagacagctgagagcagctctgcaccaggctgctggacaaccagacgcgcacctgcgcggaatgttagcctacctacatggactgaactctgagcaagccaggaggctgcaaccaccgtga

SEQ ID NO: 13849 - RNA, 1314 nt, synthetic construct
  source 1..1314: mol_type = other RNA
atgcggcttctgatccttatcgctttaggctttctgttctggcgcctgtggaagctttggaggcagctgcgattgagacaccaggcccgccaccccgttcgagatatagccagactggtagacgatgcggacagtgatgcccgaggcgacactgtcgaacgtattgatatgtccggtggcccattgaagccgggtcataggaggcgtgccctcagagacaggagactgctcccaaagcccaagcgggactggtctgacccgaaacctccgaaagtgatgagccttgacgctgccacgaggctctttgcggggacacttcggacaagagataggcatgcccgagatctcgacactgatgccgagcagctggagagacacggactgcctccttggaggtcagaagctgaagtagccgcggctctaggcattgaggaaaaacgtctccgccattatgcgatccaccgccaaagggagcgcgtggtgcactatatcgcctttgccattgctaagcgcaacggaggggagcgagtgattttggcccctaagaaggaactgaaagcactccagcgcaaactgaacaagctattagttgacaagctgcctgtgagcgatgccgcacacggatttcgccccggaaggagcatcgctagtaacgcggccccacatgcaggcaaagccgtggtcctcaagttggatctggagaacttcttcccttcgctgcatgtgggacgcgtacgggggttgctcatcgcactgggttacgcataccccgtggccgctgggttagcagcgctaatgacagaatccgaaagacagcccgttgtggtggacggcgagactttccacgtccccacttcaagtcgtcacgctgttcagggcgctccaacctctccaggactggccaatgccctggcactgcgtcttgatcgcagattgacggggttggcaagagcgcatgggtttgtctatacccggtacgctgacgacctggccttctcttcagacgacgtcgcaacagcccggcaactgctgaaaagagcagagagcgtcattcgggccgagggctttagggtcaatcgagctaaaacccgggtgatgacccaagcttccgcccagcggatagctggggtgaccgtgaatgccgcaccaggttggagcagggctcagaggagaaaattaagagcagaactgcaccgggccagaacatccggcgctaccgatccctccctctggcagaagcttcgcggcaagctcgcattcgttaggatgctaaatcgggctcaaggagagcggatggcacgagccgattcttga

SEQ ID NO: 13850 - RNA, 1308 nt, synthetic construct
  source 1..1308: mol_type = other RNA
atgagagtgctgctgctgctgttcgtaatctacgtcttttggcagattttcgtccgcttctggcccaagagggcaaccagagatttatcacgattggagaatgcagacgacgatgcagctgatgaggaggtcctcgaaacagtggcagtggatgggggccccttaaaagaacatcacaggcgccttgcactgcgggatgctcggctcttgcctaaggctaagccccgagctcatacttggccaccaaaaccgaagcctaaggtgatgtccatggatgaagccactagactctttgcgggcacgctccggacaaaaaatcggaaactgcgcgacctcaggtctgacgacgatcagttgagaaggtatgacctgccaagatgggcatccgaggaggatatagccaacgccctcggaatttcagtggcccgaatgcgctactattccatacatcgggaaaaagagagagtgagtcactacgtcagctttgcgattcctaaacgtagcggtggagagcgcatcatcatggctcccaaacgggagctcaagaagttgcagagggacctcgacaggctgcttgtgtctaagcttcccgtgtccgagtacgcccacggctttcgcaaggggcgcagcatcgctagcaatgcaagtgcgcacgtagggcgcaaagtagtggtgaagctggacctcaaggacttcttccccagcttacatgtgggccgtgtaagggggctgctgatcgcccttggctactcatatccagtggccgccaccctagctactttaatgactgaggccgtgcggcaacctgtccaagtcggcgacgaaatttttcacactcctgttggaggacgtcatgccgttcaaggggccccgacaagtccaggactggccaacgctctgaccattgctcttgatcgaagacttgccggggctgcccgggagttgggttttacctacacccgttatgctgacgatctaacattttctggcgacgatgcaggcaaagcaaggcagttgatcaggacctgccagcgaatcgttcacgctgaaggattcgccttgaacgacgccaagacccgggtcatgacgcagagaggggctcagctcgtgacatctgttaccgttaaccgtgaaaagggtctgtccagacggaggaggcgcctgctgagagcagagctgcacagagcccagcgagaaggaggtgacgcgacactgtggcgcaaactgcggggcaagctagccttcgtgtcgatgctgaatgccaggcaggcggatgcacttgccaaaaacgttagattccctggctga

SEQ ID NO: 13851 - RNA, 1311 nt, synthetic construct
  source 1..1311: mol_type = other RNA
atgccgcgcgccttccgacgaggaggcactatttttaggagtcccagacgcttcagccatactgtcgaagaggctggccccgagcggaggagaagtccaagaagatggctcactccatgtgcttcttccacccggggcgcctctatgtcactttggcagcgcttacgagactggatacagccagcacccccagccgcaaagcctccagagcaggtgagcatctgcgaggaacctgcacatccaagccccgaatttaataggcgctttacaacctcccttagatctgccgatcctagtcagacgcgtcgtagaaccagatccgggcgcttaaggcaacggggtctacccgtatggcggtgtgacgacgacgtcgcccaggcattggggctgtcactgagcgagctctatcacttcgcctgccaccgactagccgaccctcacctgcactacgtgcggttcacaattcctaagcggggtggcgaagagcgccccatactagctccgaagccgaggttaaaagctatccaacgcgatcttctggaactggccctgcatcagctgccagtacaccgggcagctcacgcgtttttgcccgggagatcaatcgcaacacatgcccggccacatctgcagcgggagtttttactgacgctcgacctccataactttttcggggctttgcacgttggcagggtcaggggcttccttatggccatgggttatgggtgggaggtggcatctacgctcgccctgctgtgcactgaggctcccagacaggccgttctggtccacggagagcgcctgtacacccctaccgcttctcgaagcctgcctcagggagcgcctacatcacccatgctggcgaacgctatcgtgtgccgccttgaccgacgcctaagtgggttggcccggtcccttggcctgaactataccaggtacgccgacgatctgacttttagcggagacgatcctacaagaatcgcatcggtgatgcgactcacacaccagatcattgccgaagaaggcttcgaactcgcgaccgcaaaaactcgcattcagcggagaggccaaaggcagcaggtgaccggcgtggtggtcaatcagacacctggagccccgagagctaggcggagaaggctgcgtgccgcaatccatcggtacgctcaggcttgttcccgcggagaggatgatccactcaggaggcgtcaactcgaaggggagctcgcattcattcacatgttgaatccagcgcaagctcgtgctctggccgcaggtttgccagatggaccccccgttgccaacgccagatga

SEQ ID NO: 13852 - RNA, 1164 nt, synthetic construct
  source 1..1164: mol_type = other RNA
atgaacctgtggcaacgtctaagggactggatgcagcctgcaccatcccctgaacatcccggcgaaatttctatctgtaaagagcgtgaacccccctcccctggattcaatcgcagatttaccacttcgatgcggagcgctcggcacgatgaactcaggcggcgtacaaggagtgggcgactccgaagacttggtctacccgtgtggagatgtgacgacgacctggctagagccttggggctgactacctccgccctttaccacttcgcctgccatcgtctcgctgatcctcacttccactacgtgagcttcactatacctaagcgttctggcgaggagaggcccatcctcgcgccaaaacctcgcctgaaggcaattcagagagatttgcttgaccaggccctgtctcgcctgccagttcatcgcgctgcccatgcgtttgttcccggcaggtcaatagccactaacgccagaccccatctgcggcgcgaattcctcctcacactggatcttcacaacttttttggtgcactacacgtggggcgggtaaggggttttttgatggcgatgggctatgggtgggaggtcgctagcaccctggctctgctctgcaccgaagcaccccggcagacagtcctcgtacacggagagcgcctgtacactcccaccggtagtcgcacgcttccgcagggagctcctacctctcccgtcctcgctaatgccattgcgtatcggttggatagaaggctgagcggcctggcccgcagcttaggattaaattataccaggtacgccgacgacctgtcattctcaggcgacgatccgacacgaatcgccacgctgatgcggttgagtcaccaaatcatcagagaggaaggctttgaggtggccccatccaagacccgcatccaacggaggggcagacgacagcaggtgacaggagtggttgtgaaccagacacctggggcaccaagggctaggaggcggagattgcgcgccgctattcatcattatgcccgagcttgcgcccgaggcgatcacaacccaagacgcagacggcagctggagggagagcttgccttcattcacatgatcaatccggcccaagcaagggccttagcagcagggctgcctgcagcaccaccagcagctaatgcgcggtga

SEQ ID NO: 13853 - RNA, 1170 nt, synthetic construct
  source 1..1170: mol_type = other RNA
atgtcactgtggcagagacttcgtgattggcttcacactgacactcagccagattccacccccacacctgcccccgatagtgcacctccaagcagccctcctagcgcgactcataaccgacggttcaccgcttctttaaggacccatacccccgcccagtctttgcgacgtacacggtctgctcgcctgaagaggcacgggctccctctctggagaaacgatcaggccctggccgcagatctcgatctgtctactccagagttataccatttcgcctgtcaccgcttagcagacccccatagacattatatttcattcaacataccccgccgtagtggagctagccgcgctatccttgcacccctgcctagacttaaagccttgcagcgacgtctgctggccctcgcacttcataggctgccagtgcacgatgctgcccatgcatttgtgcccggacggagcattgcaactaacgcccgcccgcacctaggtaaggcgtttgtgctgtcacttgacctgaaggactttttcggttcactgcacctgggccgggttagggggtacctcttggctatgggctatggctgggaggtagcatcgacactggccctcctatgcaccgaggcacctcgccaacctgtccaggtgcaaggcgaagtgaggtgggccccagttggcagtcgcacgcttccacaaggagctccgacatcccccgccctcgctaatgctatcgcctacagactggatagacgcctgaatgggctcgcgcgctccctgaacctcacatatacgagatacgccgacgacctgagctttagcggagacgacccacaggtcctcggttcgctgttgcggctaacccaccagatcgtggtcgaggaaggcttcgagctagccagtcacaaaaccagggtccagaggcagggacaacggcagcaagtagccggcgtgatcgtgaatcaggttctcgggcggtccaggcaggagagacgacgattgagggctgccattcaccggtatgcaagggctcaggccagaggtgaatctcacccggcctggcgactggaattggaagggcggttggcgtttctgcatatgctgaatcccgctcaggcgagggcactgtcctctggtttacctgacgagcccccaggagcttccgccagatga

SEQ ID NO: 13854 - RNA, 1365 nt, synthetic construct
  source 1..1365: mol_type = other RNA
atgtccaggcgcgggggtaagctttgtcggtccctgcttcacgggtcacactcttcagataagcggggcaatagaagcatcaccgagatcgttgcggcctgcctgctctgtggttggctgttcgcgatatctttaccattgccgcatttccgaaaggagaggaccgcaatgaccaacgccgcagacgtgctgcaagcctggagacttaactggcagcccgacgagtttgagtggcgttctctcacatgggagaatagggtcgacctcaatagagaagagcgggagcagaggaaacgcgaacgggccaggagagacaggctatccttcggcgggaggctatggggggtaggtcaagctcatcggtccgccgaactggattcagaacgtctggctaggtatggcctgcccgcatttgcgaacgagcgtgccttagctgaatggctggggattagcctcaagcgcctacgctggtattcttacgatcgaaaggtatcacccatctatcactacactcggtacacactgccaaaacgtggcggagggcagcgcgtcattctggctcctaaacggactcttaaggctatacagcataagatcttgttcgaactgctggcgaaagtgcctaatacagatgctgctcacggatttattaagggcagaagcatagctaccaacgccgctcctcatgtcggaaaggcttgcgtgttgaacctcgacctgaaagacttctttccgagtatcacctaccctcgcgtgcggggactctttgtggcactgggatacggatttacaatcgccagcgtgctggccttgttatgcacggaaagtgaaaggatcagcgtgcagagaggcgacaaaacacgctacgtggccatcaacgcgcggcatctcgttcagggagctcccactagtccagccattgcaaatcttatggctagaaggcttgatgcccgcctgcatggcctcgcagctaaacagggtgccgcttataccagatatgccgacgatctcactttctccgcggagtcggctgaagtggcaacaagactgttgcgtgccgccaagcgaattatagccgatgaggggctcactctgcacatggggaaaattcgctttttcaggcagagtgccagacaggtagtcaccggacttgtggtcaatgataaggtcagcgttccccgggacttgcgcagacgagtgagagcaatcctgcaccgcgccgttcaaacgggcttagcagcccagaacagggagggccgacaacacttccgggcatacctacacggtttgatcggccatattgccctgcagcacccagagcaagccgcacagatgctcgcaaaactgcgggagattcgagactga

SEQ ID NO: 13855 - RNA, 1188 nt, synthetic construct
  source 1..1188: mol_type = other RNA
atgacatccgacgcgcttagggcctggcgcctgtcttatacagatgaagagttgcagtggaggtccgcagactggaggagcgagcagtcagagtggcgggctgaacgcgaacaacaacgccgcgagaggagacgtagagacagacgctactttggagttggattgaattcacagaatctgagccgaagagccctgaacgaaaagaaactcacagcacagaacctcccaatactaaagaatgagaaagcactcgccgaatggctgaacgtggaattgtcacggctgcgatggtatacttacaatcagactaccagttctgtctatcactacgtgaggtatgtccttcccaaaagatccggcggtcagagggtgattcttgcaccgaagaccgggctgaaagctattcagagaaaaattctggccgagatcttgaataagatagtgctcacagagcccgctcatggcttccggaagggccgtaacatcgtcaccaatgcttcgcctcatgctggtaaacctttcgttctaaacctggacctgaaggaatttttccctagtatcactttccggcgcgtaagagggctcttcactgggttaggatacggctacaccatcgcgtctgtcttagcgttgctctgcactgagagcgaccgggagatgattcagcgaccagacaggccctactacgcaggtctgagccctcgagccctcgtgcaaggtgctccgacctctccagctctggccaatctggctgcaaggcgtctggataagagattggcgggcctagccgttaagcggggggttacatatacacgttatgctgacgatctgacctttagcggggaggaccgcgatgtgctgtttaagctcatgaaaaccgccgggcacatcatcgccgctgaaggcttcactgtgcacccaaagaaaacccgcttttaccagagaggacagaggcagatcgtgacaggccttgtggtgaatgataaggtcaacacgcccaggcaaatgcggcgacaagtgcgggccatactgcacaacgccgcccagaccggactcaatgcccagaacagaatgaaccatcccaactttcggggatatgtacttggcctgattgcacacattgggcagacggcacctgatttagccgccacgttccgcggccagcttgtagcactgagtgattcctga

SEQ ID NO: 13856 - RNA, 1188 nt, synthetic construct
  source 1..1188: mol_type = other RNA
atgtccgaccagtcagtactgcgggattggagactcaactggcacgacgacgagtttaaatggcgtcccgatcagagctgggcacggagaggccagtggcttgaagagagggaactcgctcggcgagctcgaagaagacgggatcgtggttttttcggcgatgagctctgggggactcccttgttcaaggccctgcacactccagcagctctggaacggttcggtcttcccgccttcgaaaacgaggcagccttggccatctggctcggaatccctctgacccgacttaggtggtatactttcagcaggcttggatctccagtgtggcattacgtccggtacgttatccctaagcgctccggaggcgagcgcgttatcctagcacctaagcgagaactgaagggactgcagcggaaagtgctcagagagattctggaaaagctgccactgagcgagccttcgcatgggtttcgcaagaccagatctattgtcacaaacgcggtgccccacacaggcaagaagtacgttttgaatctcgacctgaaagacttttttcccagtataacgttcagaagggtgagaggactgtttgtgtcacttggttacagcttcgccgtgggcacaaccctggccttgttgtgcaccgaatcagatcgtgcagtgatgcaaagaccggatcagaggtattacgtcagcttaaaccctaggcatattattcagggagctccaacctccccctacctagccaatctaattgcgagagatctggacctgcgcctcaatggccttgctcggaaacaccaggttgattatacacggtatgcggacgacctcacattttctggtgacgacctcgatgcgatcctgcggatcctgtccgtcgctaaagtcatcataaaggaagaggggttcgtattaaaccccaaaaagactcgactgtacaggaggtcagggcgccagagtgtgacgggactggtagtgaatgagaaagtgaataccccaagggagatgcgtcgccttgtgcgcgctattctgcacaatgcccagaaaggcgggctgaactctcaaaatcaggccaagaggccaaacttccgcgcctatgttcaagggttaattggccatataggccaaagtgacccgaaccgagctgcagccttgttacgccagctcgcagccatccctgattga

SEQ ID NO: 13857 - RNA, 1128 nt, synthetic construct
  source 1..1128: mol_type = other RNA
atgtccactttcagttcattcatcaagaacatcaagaagggctttaccggaaagaacaagaagcccgaaaaggagattcagagccccaagattgccgtggccctttccagcgatgtctcgaaagtgccccagaaacttgatgatgttagtctgccagtgctccggggaaagtatgcgcttgcaaaatggttaggaatatctgccagcaggctgacctggttcacatatgagacaaagtacaattctgtgtggcattatgtccggcatatcatcccaaaacgaaatggtggagagcgggtaatactggctcccaaacgcgagctgaaggccctccaacgacgagttttagacgggatactcaaccaggtgcccacctctccacaagcccacggcttcgtgatgcaacgttccatcactactaatgctagacctcacgtgaataaagcggttgttatcaacctggacctgaagaatttctttccttcagtcaccttgccacgcgtgctggggatttttcggactctggggtataacaaagaggtggcacttgcactcgccagactgtgtaccgaatgcgaccgggaggtaggccctcacttggattctaagtacaaggacaaggaatttttcgtgagcgtaacccccaggcaccttgtgcagggtgctccgacgtcccctgccttaagcaatttggtctgctggaagctcgacaaacgcctgaatgggctcgcacagacctatcaatttacatacacaagatacgcagacgacttgactttcagcggcgatgacatacagtacgtggagctgatcctgaaagtggctaacggaatcgtaagggatgaaggcttcaaagtcaacaaagataagacgcatgtcttttatccttcctcacgccaggtcgtgactgggctggttgtcaacgacaaagttgccaccccgaggcagctgaggcgtcagatgagagcgattattcacaacgctcagtttacaggcctcgaagctcagaattacgagcaacatcctaactttagataccacttgctaggcgtggccgagttcatcggtagtacacatccagataaggccgaacagatgaaacagattattcacgctctaccatcatga

SEQ ID NO: 13858 - RNA, 1134 nt, synthetic construct
  source 1..1134: mol_type = other RNA
atgatcgattggtatcagcagtggcgcggggaggtggagcaaagaaggcaggaacgggaaagaaggaggttggagcgacctctgcaggatcggcgatacttcggcgaggaaacgtggggggcatccgcagaacatctgaaagccgagacagacgaaccgtgtctgcagcacttgtatctcccactcctacggagtgaaaaggagctggccgcttggttgggaatccccctcacgagactgcgctggtttaccagggaccaaccggcagacacagtatggcattacgtcgcccattctgtccccaagagatcgggcggacaacgccttattctcgctcccaagcgcgacctcaaagcacttcagcgtcatgtgctgcaccacctgttgaaccacgtgtccgtgactgagatggcacacggcttcgtcgctggtaggagtattattagcaacgcgcagcctcatgtgggcaaagaaatcgtcctcaacttcgatctggctgactttttcccttccatcacattcccacgtgtccgcggcctgttcctcagcctgggttacagcttttctgttgcttccgtgttagctctgctgtgcaccgagcacgagagggaggccttcgaccatgatggtactcgatactttatatcagtaggtcccagacacttggttcagggagccccaacctcacccacacttgcgaaccttgctgcggcacgcctagatcggcggcttgctggactggggagggtccaaggattcgcctacaccaggtatgccgacgacctgactttttcaggcgatgaggtggctggggcctattggctattaaagagcgtgccccctatcgttagagaggaaggctttgtgattcacgaggggaagacccggctgtttcgtcaatctgcccggcaggtggttacaggcctggtggtgaatgagcagctcggaactccaagagaactgcgccgaagagtacgggctattttgcacaaagcccaccagaccgggctcgaagcccagaatcacgatgggcatgccgacttccgagcgtacctgcagggattaatcggctttatacatgaagccaatccagcccaggctgcacctcttagggcagccttagccgcactgtga

SEQ ID NO: 13859 - RNA, 1383 nt, synthetic construct
  source 1..1383: mol_type = other RNA
atggcgaactttttcagacgcctcttcagacgcaacgccttaaaaagcgacattgtggcggacgccccacccgttactccaacaatcgtgccgaccccgcccgaagcattggtcatgccaacagcggctctccctttgcagacgcctatacaggtggaacaagtggcccaagccgccggtgctgtcgcttatgttattctgccatccgcatcagccgagccaaccccaacacctgtagcagtgcccgacgctaccccccttcctactgttacggtgaacggcgtcgcttacgctcaggatgacctcgacgaacgcgcactacgtgaccgggcaaccttcggcgatgaactgtggggaatcgcaaacggtaaggaggcaaatacaactgacgccgagaaactcgcccgcctgggcttaccactcctactgagtgagcaagacgtcgccgatctgctgggaattcctctcaacaggctgaggtggttcacttttgatcgcgctgccgataccacttggcactacgtaaggagggtggtgcctaaacgatctgggggggaacgggtcattctggccccgaagcaagaactcaaagctttgcagcggaaggtgctttccgatattgtgggccgagctcccgttgcacttgccgctcatggcttcgtccctgggaagtccacaattaccaatgcaagacagcacgtcgggaaagcggtggtcctgaaactggatttgcaggatttctttccctctatcacatttgcccgggtgagagggctgctgatcgcgttggggtatgcctatgctgtcgcaagtacgcttgcgctcttgtgcacagagtacgatcgggaggagtacacccgcgacggaacgagatacttcatcagcgtggggccaaggcatctggtacagggtgcccctacttctcccactctggctaatcttgtgagctggcaactggaccgaaggttaaccggcctcgcaggagccttcgactttacttatactcggtacgccgatgacctggtcttttcgggagataaccccgatgtagtgcagaagcttcggttccttaccgaacgcataataagggacgagcactttaccgtgaatcgaaagaagacccgggttgcaagacagtcagcccgacagatcgttaccggcttagtggtgaatgaagccgtggcaacaccccgtgacctgcggagaacactgagagctatcctgcaccacgccgagaaagagggactcgcccagcagaacagagagggaaggaaggactatcctgcctacctgcagggtatgatcgcttatgtaaatgcagctagcccccgccatgccgccgttttgcgtacacagctaggcaagctgaggggccaggcttga

SEQ ID NO: 13860 - RNA, 1263 nt, synthetic construct
  source 1..1263: mol_type = other RNA
atggaagccgccacagccgcggacgacattgatgaagtgctggaaggtgaagggcaagatgaggatgaagatggcgccgattggtttcaggtcagcaagcatggcttcgaagtatcagaagacgacgacgatgacattactctgcagggtcctgcctacagtggacatactgggcagcgtgcacctcagcacactgcggacagggcctattttggcgaggagacatggggagtgtcggctcgtcaacggagcgcagagatacagcccgcccagttagctcgctaccagctgcctgtcctgcggagcgaggttgacctcgctacatggctgggcatccctctgtccaggctccgttggtatacacacgatagaccagccgagcgaacttggcactatgtcaggtatgctgtgccgaaaaggtcaggccagggagagcgggttatcttggcccctcgccgggagctaaaggccttgcaaagaaaggtcctgaagggtattgtggcaaaggtgccggtagccgcaacgacccacgggtttgtcgccggaaggagtacactgtccaacgctagcgaacacgctgggaaaggggtggttctcaagcttgatctcaaagactttttccccagtgtgacgttccggagggtacgcgggctttttaccgctctcgggtactcttacgcagtggcgtctgtgcttgccctgctctgcactgagtacgacagacagccattcgagaggagcggcgaacagtactacatctccgtcggccccagacatttggttcagggtgcgcccacatcccccgggttagctaatctggttgcatggcggcttgacaggcgcctagctggcttggcttccaaacgtgggtttgtctatacccgctatgccgatgacctcactttctctggagaggacgcagaagctgctgcacgacttggagctgccgccgctagaattatagccgatgagcaattcaccgtaaatgcaggcaaaacccggctgctgagaagaggaggccgccagacggtgaccggactagtggtgaacgcatctccagccaccccaagagaattacgacgcaggttgcgcgccatcctgcataatgccgcgagagacggactggatgcccagaaccgggaggatcgaggccattatgcggcatacctgggtggcctcatcgcatacgtgggctcagccaacccctcacacggtgacgtgctgcgccgacaattccggaggcttgttaccccaagagagtga

SEQ ID NO: 13861 - RNA, 1536 nt, synthetic construct
  source 1..1536: mol_type = other RNA
atgcagtatgaagtgcgtctggccggttatcccgatctggtatgcctttgcagggctggaggcggtggctccagatcaacaggtttcgccgtcagccggagcgagtgtacatttatgaacctggcctcactgctcctggagctcaaacccttactggctgatccggaagctaattttgaccgcatcacagaactgctggaccggcaccagggactggcagaatacgaagtcgccagattctatgttagacgcgtgtggcaggccccagtggagtcacgattgagatcgatggatgcccgcgagcgattaaaggggattcgtcagctccctctgctgttttcttcagcaaccgcagcaaggctcctgaggcagcgggttaaggatcccgacacccgcgtggcacaagcagcacgtgcaagcgttcgccggcttggcctagctgacgtctctttgccggaccggagagtgaaacccggccgttctgctggctctataggacggtggaatccaacaggctggaatttcgggctgttcgggaacgagctgtacggcttcagtaggaaggcgaagcgaccaccccctagagtgggcgagctacctgaactaagaacgcgggctgatgtggcggaactcgttggggtggaggagaatgcgttggacgccctgatgaggccaggaactgaaagcgggagtggatacgtggagtttgaggtgcccaaacgtaccggaggtgtgagaaggatcagtgcacccaggcagaagcttaaggaggtgcagcgcgctctcttagacaaagtactagctcgcatgactccacatccagcagctcatggtttcattgagggccgcagtacggtgtccaacgccgaaccccacgtaggagcaaccgctgtggtccgggtggacattgaagattttttccccactgttcactaccggcgagttaagggattgttcctcgcttacggctatggagacgaggtcgctggggtacttgccggccttaccactcacagaacaaagcttcctgacggtaccgtcgcctggcctggagtccttccccaaggtgcccctacttccccggcgatcgccaatttggtctgtagacggatggatgccaggctcactgccctggcgaaaaaattttccgccatctacaccaggtatgccgatgatctgagctttagctttagagagcctccagagcggttaggcaggttcttctggtggctgaatgctattctccagcaggaagggtttgccgaaaacggaaagaaacgccgcgtgatgagacaggggtcccgccaacgagttaccgggctgacagtcaaccagaaggtgtctatccctcgtgaagagcgaagaaggtttaaagccatattggccaactgccgacaccatggggtagccgcccaagctagaggcaggcctgacttcgagaggtggctggaggggtacgcggcttatgtgcgcatggtccatccagagttgggcgccaggtggcagcgggaagtgaaggagctgctcgcacggtga

SEQ ID NO: 13862 - RNA, 1428 nt, synthetic construct
  source 1..1428: mol_type = other RNA
atgaatctcgcgagtttgttacttgagctgaagcctctgctagccgatcctgacgcaaacttcgaccgaattacagatctgctggagcgccatcagggtctggcggagtatgaagtcgcccgattttatgtgtcaaggagctggaaggaaccagtagaaagcagactgagatccgtggatcccagggaacggagcaagggggtgagacagctgcccctgatgttttccgggacggtggccgctaggcacttgagatctcgggtcaaagacgccgattcccgcgttgcttcagctgctagggccgctgtgaggaaactgggccttgcggatgtagctccccccgacagcagagtcgctccctcaaggcaccatggccgacggtccgttggaggatggaaccctactgggtggtactttggcctgtttcgctatgagacacagggctggtccggcagcatgaaacggccaccacctacaagcggcgagcttcctcgtctctctacccgcgcagacgtggccaaattggttggggtcgacgaaagtgagctggacgccttaatgcgccctggtaccgaggccggatccggatacgtggaattcgaagtcccaaagcggagtggaggcgttcgccgcatctctgccccacgacaaaagttaaaagaagtgcagcgtgccctgctggatcaggtgctcgctagaatgaccccccaccccgcagcacacggcttcatagagggccgatctactgtctcaaacgcaggtccgcacgtgggctctactgtggtcttgcgggtggacctcgaggacttcttccccaccgtgcattaccgtcgggtgaaggggctgttccaagtgcatgggtacggggaggaggttgctggtgtgcttgcgggactgacaacccaccgccctaagctgccagatggtacagtcgtttggcccggagctctccctcagggagctccaacaagtccggcaatcgcaaatcttgtgtgtaggagaatggatgccagactcacggcacttgccaccaagttcggcgcaacctatactcggtatgcagacgatctgtctttctcctttagggcgcctcccgagaggttgggtcgatttttctggtggattaatgccatcctacagcaggaaggctttactgagaacgggccgaaaagaagagtgatgcgccagggatcaaggcagcgcgtaaccgggctaactgtgaaccaaaaggtcagcatcccacgggaggagaggaggagatttaaagccattctcgccaattgccgacggcatggtgtcgcctcgcaagctcgtggccgtccagacttcgagcggtggttggaagggtacgccgcatacgtacggatggttcacccggaactcggagccagatggcagcgcgaggtaaaggaactgctcggcaggtga

SEQ ID NO: 13863 - RNA, 1422 nt, synthetic construct
  source 1..1422: mol_type = other RNA
atgggcatggacctcgtgggactgcttctggagctcaaacctcttatggcggacccagaagctaatttcaagagaatcactgccctgctggagcagcaccagaatcttgccgagtatgaggtggctagattctacgtgtcccggcagtggttggctccagtgggacgtatgttgaggagcgtcgatccccgcgagaggcaccaaggcacacaacagataccactgctattcgcaagagccacggcgagtgcacaactccgtcgtcttgtcaaggatccagacaaacaagtagccggcgccgccagagcagcagttcataaactggggttagccgacgttgcaccgcctgatcgccgattcaagcccccacggcatcctacaccccaatcacgaggcgggtggaacccaaccggttggaactttggactgcccatgcgatggggcggaaggccaaagaaacagcccccgctgaaaggtaagttacccaaactctccactcgcaaagatgttgctgagttggtgggtgtccaggaagaggagttggcagctctaatgaggcctgggaccgaggcaggaagcggatatgtggaattcgaggttccgaagaggtccggtggcgtgcggagaatttcagcgcctcgcgccaagctcaaagaagtgcagagggctattctcgagaagatcctggaacagatgcccacacacgatgcagcacacgggtttgtcaaggggagatcgaccgtatctaatgctgaacctcatacaggcgccaccgtggtagtccgcgtggatctcgaggacttttttcccactgtgcactatagacgggttaagggcctgtttcaggctcacggctacggggacgaagtggctcgaacattggccgggctgagcacccatcggcctaaactgcctgacggtacggtggtatggcctggcgcacttccccagggagctccaacctccccagccatcgcgaatctcgtctgtcgccgaatggatgctcggctcactgccctggccaaaaaagccggggccacctacactaggtacgcagatgacctgtctttcagctttgagaaacctccagaaaagctgggtaggtttctgtggtgggtcaacgccattctgcagcaggaaggattcctagagaatgccccgaagcggagagtgatgaggaagaacagtcgacagcgggtgaccggattgacagtcaacgaacaggttagtatcccccgtgaggagcgcagaaggttcaaggctatattaaacaattgccggaaacacggcgtcgagtctcaatcaaggggccgcaaggacttctctggctggctgagagggtacgccgcgtatgttaagatggtgcatcccgaattgggagagcggtggcagcgcgaggtgaaggaacttctgggggaatga

SEQ ID NO: 13864 - RNA, 1416 nt, synthetic construct
  source 1..1416: mol_type = other RNA
atggacctggtcggactgctgctcgaactgaaaccacttatggccgaccctgaggccaattttgaacggataactgaactcctcgagcaacaccaaggcctagctgagtatgaggtggcacgcttctacgtttccaggcactggctggaaccggtaggtcggatgttgcgatccgtcgatccaagggagagattgcaaggaacaaaacaggtgcctctcatcttcagccggggaactgccagcggccaattgcgaaggttagtcaaagatcccgatgagagggtttcacgtgccgcacgagcagctgtccataagttgggcctcgcggacgtagctcctcccgataggcgtttcaaaccgcccaggacccctagacctatggccctggggggatggaaccccacaggatggaactttggaattcgaaccgggagatgggctagcccaaagaaagccccacctcttaaaggtaagttacccaagctggccagtagacaggacgtggccaagctagtgggcctagaagagaaagaactggacgcccttatgaggcctggtacagaggcagggtccgggtatgtggagtttgaaatagctaagcggagtggcggtgtaaggcggatctcagccccacgggccagactcaagcaggtccaaagaactattctggaacagatcttgtctcacatgccgacccacgaggctgcccatgggtttgtgaagggccgcagcacagtgtctaacgccgctccacataccggagcaacggtggtagtccgggtggacctggaagacttctttcctacagtccactaccgccgagttaaagggctctttcagtctcatgggtacggcgatgaggtggcgtccactttggcgggcctgacgacgcacaggcccaagttagctgatggtacagtggtttggcctggcgcacttccccagggtgcaccaacctcacccgcgatcgccaacctggtgtgtcggcgaatggatgcccgcctgaccgcacttgctaaaaagtacggcgccacctatacccggtatgctgacgacctctccttcagcttccaggcaccccccgaaaagatggggcgctttatgtggtgggtcaatgctattctccagcaggagggcttcgcagagaacaatccaaaaagacgtgtgatgagacgggcccacaggcagagggttactggccttactgtgaatcagcaggtgagtatcccaagagaggatcggcgccgcttcaaagccattctggcaaattgccgcaagcatggagtggcttcgcaggctcgtggccgcaaggacttcgagtcttggctgagaggatacgcggcctacgtgcgcatggttcacccggaactgggggccagatggcagcaggaggtcaaggaactgctggggggatga

SEQ ID NO: 13865 - RNA, 1443 nt, synthetic construct
  source 1..1443: mol_type = other RNA
atgtcactcgtaggactactgctcgaactgcgacctctgctcgctgacccagatgctaacttcgaccgcgtgtcggaactgttggaacgtcatcaggggctggcagaatatgaggtagccagattctacgctgggcgagcgtttgttgggcctgtgggcaggctgctcgggtcagaagaccccagggagaggcttcgaggcgtcaggttagtgccccttctgttcgctagagccaacgcagcccagcaccttcgccgaatggtgaaggacgccgataatgcagttgctcacgctgccagagccgctgttagaaccctgggactcgctgacgtgtctccccctgacagacgtgcaccagcaccgaggtttccctccccaacagctaggggcggctggaatccaaccggctggacttttggattattcaggaatcactacgtattccggcggggtgccgcagctactactaacgcccccttaacggctccacctaaggcggacgttcccgagctgaagtcccggaacgatgtcgcaaagctggtcggggtaaaagcgagtgccctgccctcccttatgcgtccaggcacgggtaaagggagcggatacgtggagtttgaaatccccaagcggactggtggcttgcgcaagatctccgcacctcgggtgcggctgaaaaacgtccagcgagccattctgcgcgaggtgctggagaagctgcccacccaccctgctgcacatggattcgttgaagagaggagtacagtgacaaatgctacccctcatgtcggcgcgtcagtggtcgtgagagtggatatcgaggattttttccccaccgtacattacaggcgggttttgggctttttcatgagatactatgacgaaaaggtcgccgctgcactcgccggactaaccactcatcgcagcaagctgccagatgggactgtggtttggccgggtgcgcttcctcaaggagcccctacatctccggctttggccaacctggtctgcaggagactggatgcccgtctggatgcactcgcaagaaaatctggtgccacctatacacgctatgccgacgacttgacatttagctttcgcgatcctccagcccgcctgggtaggttcctctggtgggttaatgggattctccagcaggagggatttgccgagaatgtcaaaaaacggcggattatgcggaagggcggaaggcaacgagtgaccggactcgtggtggccgagaagccagccataccacgtgaggacagacggcgcttcaaggcgatccttgccaactgtagaagacacggcgtggaaagccaggctaggggcaaaccggatttccccgcctggttacgcggctacgcagcatatgtgcggatggtgcacccagaattgggggccaagtggcagagagaggtcgaagagatacttctaaaaaaatga

SEQ ID NO: 13866 - RNA, 1425 nt, synthetic construct
  source 1..1425: mol_type = other RNA
atgtccctggtgggcctgttatttgagctcaagccattactcgaagaccgggagcgcaattttgataggattgtcgagctgttggagaagcatcgcaatctggccgagtatgaggtggcccgattctatgtgtcgcggaattggctggaccccatatccaagagacttgcatccattgaccctcgagagaggctgaggggggtgagactcatccctttactgttcgccagggccaccgctgcacaacatctgaggcgcatggtgaaggacgccgatatggctgtagcgagtgccgcaagagccgccgtccattcactggggatagccgacgtcgctcccccagatcgtagagcaccaccccccagataccctgggccaagtgccttgggcgggtggaatcccagtggctggactttcggcttgcatcgcgatcattgggctttcagggcgaacagagcgaaggcgaagaccccccctaaagcagatgttcctcccctgaagacaccaaaggatctggccgccttgctaggtgtcaaggtgacagctctgcgctctctcagccgtcctggtaccggacctggtagcggatacgtggaattcgagatccctaaacggactggaggggttagaagaatctcagcaccgcgaatgccgctgaaacgcgtacagcgtacaattcttgaccagattctggcaaaacttcccgcccacccagcagcccacggatttgtggaggagcgctctaccgtttccaacgcttcaccccacgtgggagccgccattgtcgtacgggtggacatcgaaaacttctttccaactgtgcactacagaagagtgttcgggtttttttttcaacactacggagaagaggtcgctaaggccctcagccagctcactacacatcgacccaagttgcccgacggtaccgttgtgtggccaggtgccttgccacaaggggcacctacttctcctgccatcgctaacctcgtatgccgtcggcttgatgccaggctggcagctctagctaaaaaagcaagcgctaattacacacgctacgctgatgatctaacgttctctttccgggacccccctgacagacttggccggttcttatggtgggttaacgcaatactccagcaggaaggctttacggaaaacgtcaaaaaacggaggatcatgcggaaaggcaacaggatggcggtcaccgggctggtggtgaatgacaaggtgggaatcccgcgagaagatcggcgacgcttcaaagccattctgaacaattgtcggcaccacggagttgagagccaggcgaggggcaaaccggactttgctgcatggctgcgcggctatgccgcttatgctaggatggtgcacccaaagcttggcgagaagtggcagagggaagtcgaagaactcctggccaagtga

SEQ ID NO: 13867 - RNA, 1407 nt, synthetic construct
  source 1..1407: mol_type = other RNA
atgtccctggtcagccttctgttcgaattgcgccccttgcttgccgaccctgaggccaactttgaacgcattgtcctgttgctggagcgaaaccaggatcttgccgaatacgaagtcgcccgcttctatgccagccgaacgtggttaggacccctcggccgtatgatggagagtattgatccaagggagcgtctgagagctgtgcgcctggtcccactgctcttcgctagagcacctgccgcaggacacctgcgaagacttgtgaaggatgcggacagtcgggtcgtcaacgcagctagagccgcagtgcggaaactgggcatcgccgacgttgccccaccggattctaggttcaccgcccctaggtggccaagagcaactgctgtgggcggctggaatcccacagggtggtccttcggcctctacaggtcagggtccgaaaagtccccgccacccgcaacagatttacccgctttaaggtcgcgagcggacgtcgcgagactcgttggagtggacgaggccaggctggtggccctaatgcgtcctggctcaggacctggttctgggtatgtggagtttgagatccctaaacggtccggcggcaagcgcctcatatcagctccgagggcggagctcaaagcagtgcaacgggcgatccttgacaaagtgctcagcaaaatacctgcacaccccgccgcacatgggtttgtggagggtaggagcacagtcagtaatgccgctcctcatgtgggtacccagagggtggtgcgggtagatattgagtcattctttcccactgtacactaccgcagggttaaggggttgttcgaggcttacggatacgacgaggtggtggccgccaccttagctggcctcacaactcaccgggctaagcttcccgatggggcagtcgtgtggcctggagcactaccgcaaggtgccccaacttccccagcaatcgctaacatcgtttgtcggcggttagacggccgactgagcgctctagcgagaaaggtaggtgcaacctatacgagatatgctgatgacctgagcttctctttccgggaacctcccgctcgcgttggtcggtttctctggtgggtgaatgccattctgcagcaggagggatttctggagaatctgcccaagaggagggtaatgcggaaaggggggaagctgagggtcaccggactctctgtggacgaaaaagttagtatcccacgcgaagaacgtcgcagatttaaggccattttggccaactgccggcaccatggcgtagcctctcaggctcgtggccgaccagattttccaagatggttggccggatatgctgcatacgttagaatggtgcatcccgagctgggggaaaagtggcagagagaagttgccgagctgctggcccgctga

SEQ ID NO: 13868 - RNA, 1419 nt, synthetic construct
  source 1..1419: mol_type = other RNA
atgaatctggtggggctcctgctagagctgaagcctctcatgatggatcccgaggccagctttgacagaatcgtcgaactgctggagcacaaccagggcctggccgaatatgaggtggcacgcttttacgttgcccgcgcgtggaaggacgcgatagaatcgcgggtcagatcacctgacgctagagaaagactacgcgccgctcgcctaattccattgttactggatagaaccagtgcagctcgactcctccgacgtctggtgaaggatcccgataccagggtgtcagcatccgcacgagcagctgtgcgaaagttgggcctggctgacgtttccccccccgatagtcgagaggagcctccaagccatcctcacccatgggctatcggagggtggaaccccacaggctggtcctatggcctcttccccgaaacctctaaagccgtgcggaagcgtcctccacctgtgactgaggcccttccacctctccggacaagggaggacgtggctaagctgctgggtctgggtactgctgatctggacgccttaatgaggcctggtgccgaatctggctcaagctacgtcgagtttgaagtacctaaaaggagcgggggagttcggaggttaagcgctccccgcccaaagctgaaggcagcacaacgggccttgctcgaacaggtgcttgccagaatgccatcccaccctgccgctcatggattcgtcccgggaaggagtactgtcacaaacgctcagccgcacgtaggcgccaccgtagtggttcgggtcgaccttgaagacttctttccatcagtgcacttccgcagagtgaaaggcctgtttgaggcccatgggtatggcgaagaggttgccaccgcgttagcggggcttaccacctatcgcgccaaacttcccgacggcactgtggcctggccaggagttctgccacagggtgcacccacgtctccagcgatcgccaatctggtgtgcagaaggatggatgctcgacttgccgccctggccgccaaagttggagcaacgtacacaagatacgctgacgatctcagcttttctttccgtcagccccctgagcgtttgggaaggttcttctggtgggtcaacgcgattctccagcaagaggggttcgcagaaaacgggcccaagcgcagagtgatgcggcaaggaggcaggcagcgggtaactggtttgacagtgaatgaacgcgtcagtatccccagggacgagaggcggagattcaaagctattctcgctaattgtcggaaacatggggtcgattcccaggcaagaggacggccggattttcgccgttggcttgagggctacgcagcatacgtgcggatggtgcacccggagttgggcgagacatggcagagggaagtaaaggagctgctggccacctga

SEQ ID NO: 13869 - RNA, 1419 nt, synthetic construct
  source 1..1419: mol_type = other RNA
atggacctcgtgagtttgctacttgagctgaaaccactgatggaggacccagaggcccacttttctcggatcacagagctgctggaaagacatcaggggctggctgaatacgaggtagcgcgcttttatgtgagccggcactggtcagaggtggtgaccaagagactgggatctgtagaccctcgggagcgcattcaagccgtccggttaatccccctcttgttcccacgggtgacagcggctggacaccttaggcgcagagtcaaagatgcggactcacgcgtggcctctgccgcaagagctgctgtccggaagctgggactggcagatgtctccctgccggatagccgtgaagaaccacccagacgaccatcaccccatgccttgggcggatggaaccctactggatggcactttggcctttaccctcgaaggagggaagatctcgtgaagagaaagccctctgtcaccgcaaaactgccaaaactgcagtcgcgggatgacgtggccaagttggtcggggttgacgtggccgagctcgatgctctgatgaggccgggatccggagctggatccggatacgtggaatttgaaacacctaagcgctccgggggcatgcgcagaatatgcgcccctagggccaagctaaaggccgcacaacgcaacctgctggagggccttttgacccatctgcccacacatcctgcagttcacgggttcgttccaggccgtagtaccgtgacgaatgcagaggttcatgtaggcgcccatgtggtcgtccgagttgatttagaggatttctttcctactgtacactaccgcagagtgaaaggctttttcgaggcccacggttacaatgacgaggtgagctctacccttgccggcctcaccacttggaggcccaagctgcctgacgggactgtggtatggcctggcgttttgccccagggtgctccaacctcacccgccatcgctaacctcgtgtgcaggaggatggacgctcgtctgcacgcgctcgcgaagaaagccggggctagttatacacggtacgctgatgacctctccttcagcttcgtgaagccgcccgaaaggctgggcaggttcctttggtgggtgaacgctatcctgcagcaggaaggttttagcgagaatgccgcaaagagaagggtgatgagacaggggggtcggcaacgagtcactggcctgacagttaatcagagagtgagcattcctcgggaagagcgtcgacgtttcaaagccattttagccaattgtcgcaaacatggtgtcgaaagtcaggcaagagggaggcccaacttccccgcatggctcgaagggtatgcagcatatgtccgaatggttcacccggaattaggcacgcggtggcagcgcgaggtgaaagagctcctaaacccatga

SEQ ID NO: 13870 - RNA, 1419 nt, synthetic construct
  source 1..1419: mol_type = other RNA
atggacctggtgagcctgcttctcgagcttaagccgttaatggaggaccccgaagcgaacttccagcggatcacagagctgctggagcggcatcaggggttagccgagtacgaggtggctcggttctacgtgtctagacactggtcagagactgttagcagacgtttggggagcgtggatcctcgtgaaaggctcgaggcggtgcgactgatccccctactctttccccgagtctcagctgctggacaactgaggaggcgcgtgaaggacccggattccagggtgggaagttgcgccagagccgcagtcaaaaagatggggctcgccgatgtgtcactgcccgactccaggattgctccacctcgccggcctagtccaagagcacagggcggttggaaccctacaggatggaattttgggttgttccccggactcagagcgacgccagtgaagaggaagccagcagatacccccgtcctaccagagctgcgtaccagggaagatgtagctaagttggtgggggtggagccctccgaactggaagcactaatgcggccaggatcaggtcctggtgccggctatgtggagttcgaaacacccaagcggtccgggggggttagaaggatttgcgccccacgggcacgtcttaaagcggctcagcgagcactgctggaaggactcctggcacgcatgcccacgcatgaagccgtgcacggctttgtctctggccgttcgcctgtcaccaatgccagggctcacgtcggcaaccaggtcgttgtgagagttgacgtggaagatttcttcccatctgtgcactacagacgggtgaaagggctcttcgaaagccatggatataacgaagaggtcgccagcactttggccggactgaccacttggaggccccgacttcccgatggtactgtagtttggcctggtgtgctgccccaaggggctccaaccagtccagccatcgcaaacttggtatgtcggcgactggacgcacgcttacatgcccttgccaagaaggctggcgggcaatacacacgctacgctgacgacctgtcctttagttttgccaaaccgcctgaacgcatgggccggttcctctggtgggtaaatgctatcctgcagcaggagggcttcgctgagaatagcgcaaagagaagggtaatgcgccagggcggaagacaacgggttaccggtctgacagtgaatcagcaggtcgccattcctagggacgatcgccgccgctttaaagcaatactggcgaactgtcgaaaacacggcgtggagtctcaggccaggggaagagccgactttccggcttggttggagggctatgccgcctatgtccgaatggttcaccctgagcttggcgagagatggcagcgggaagttaaagagcttctcggccgctga

SEQ ID NO: 13871 - RNA, 1047 nt, synthetic construct
  source 1..1047: mol_type = other RNA
tctcatccgcatgcgatgggagggtggaaccctactgggtggaattttggtctaagccctgggatggggggcagagtgaagaggaaaccgccctccactggacctttgcccgtactgcatacacgggaggacgtcgctaagcttgtcggcgtggacgctgctgagttagatgcgctgatgaggcccgggtctgagtctggctccgggtatgttgaattcgaagcaccgaaacggtcagggggcgtgcgtcgtctgtgtgcaccaagggccaaactgaaggccgttcagcgcgccatcctggacggcatactggcccatctcccaacccaccctgctgtgcacggctttgtcgctggaagatcaacggtgacaaatgcagagccccacgtgggcagcaccgtagtagtgcgagtggatgttgaggactttttccccactgtgcactatcgaagagtgaagggcctctttgaagcccatggatatggtgatgaagtgtcctcggttttggccggtctgaccacgtggagggcaaggctcaaagacggaacagtcgcctggcctggagtcctaccacaaggcgccccaactagtcctgccattgccaacctggtgtgcaggcggatggatgcgcgccttaccgcgttggcaaaacgggccggagctaaatacacaagatacgcagatgatctgacatttagctttcgcgagccacccgaaaggcttggtcgattcctctggtgggttaacagcatcttacagcaggaggggttcgccgaaaacgccgcaaagcggagagtgatgcggcagggcggacgacaaagagtgaccgggcttaccgtgaatcagcaggtcagtattccccgcgaggaacgcagacggttcaaggccatcctcgctaattgcaggcagcacggcgtagaatcccaggctcgtggtcgcgcagacttcgctgagtggctgcagggatacgcagcttacgttcggatggtccacccagaactcggcgagcgatggcaaagagaggtcaaggagctgttggcccgctga

SEQ ID NO: 13872 - RNA, 1416 nt, synthetic construct
  source 1..1416: mol_type = other RNA
atggatttagtggggctcctcctcgagcttaagccattgcttgcctcccccgaagagaactttgacagaatcgttgcgctgctggaaagacaccagggactcgccgagtatgaagtcgctcgtttttacgtgtcccgctcttggctggagcccgtagccagacgcctcaagtcagtagatcctagagagcggctacaggccgtgcggttgattcctctgctgtttgctagggcgagcgcagctggtcagttgagacgaagggttaaggatccagatagcagggtcagctcccatgcgcgcgcttcagtgcgaaggctgggtctagctgatgtgagtttacctgacacccgggctgatccccccagattcccttcggcaacagcagtggggggttggaacccaacgggctggtcatttggtctgtacccatcaatgagggccccagtgaagagaaaacctgccgccacgactgctctgccggtgctaaagacaagagcggaagtggcaaaattagtgggcgttcctgtctccgagctggacgccctgatgaggcctggatctgaggccgggagcggctatgtcgagttcgacgtccccaaacgaagtggtggagtgcggagattgtgcgcaccacgagccaaactgaaagctgtgcagcgcgcaatcctggacaacgttctggctcatctcccaacccacccagccgtgcacggctttgttcccggtcggtccactgtgactaatgccaagccccacgtcgggagtaccgtggtggtcagagtagatctggaggacttcttccccaccgtccattaccgccgcgtcaagggattgtttgaagcccacggctatggcgacgaagtgtcttctaccctagcaggattaaccacttggcggcccaggcttcctgacggcacagttgcttggcctggcgtacttccgcaaggggcgcctacaagcccagcaattgcaaatctggtatgccggaggatggacgcccggttgacagctctcgcaaagaaggctgacgcaacctacactaggtacgctgacgatctctcctttagcttccagaaaccgcccgaacgactgggcaggttcctctggtgggtgaatgcaattcttcagcaagaaggcttctctgaaaacgccgccaaaagacacgtaatgaggcaaggaggacgccagcgggttacagggcttaccgtgaatgagcaggttagtatcccgagagaggaacggcggcgcttcaaggccatactcgccaattgtcgtcagcatggggtggaaagccaagctcgtggccgcccagatttcgctaactggctgcaggggtatgccgcctacgtccgcatggtgcatcccgagctgggagagcgatggcagagggaggtcaaagagctgctggcccgttga

SEQ ID NO: 13873 - RNA, 1416 nt, synthetic construct
  source 1..1416: mol_type = other RNA
atggacctggctggcctgttgctagagctccagccgctgatggccgagcccgaaacgcacttcgaaagaattgtgggcctgctggaacagcatcaggggctcgccgagtatgaggtggcacgcttttatgtctctcggcattggatggactctgcatccaaacggctcggaagcgcggatcctcgcgaaaggttgcgggctgtccgtctcattccattgctgttcccccgtgcgatagctgcaggccaactgcgaaggcgggtgaaggacgccgactccagagttgccgctgctgcaagagccgccgtaaggaagctgggactggccgatattagtccacccgactcaaggatagaaccgccccgacaccccgggccaagaagtttgggcggatggaatccaaccggctggaatttcggcctgttccctgcggatggcgagagggtgaagagaaagcccgaagttgcaacgagattacctgagctgcgcgacagggcagacgtagcccgactcgtgggtcttgatgagcgtgagctggcggctcttatgaggcccggcagtgaacctgggtcgtcttatgttgagtttgacgtgccaaaacgttcaggcggtgtaaggcgactctgtgcaccccgcgctcgtttaaaggccgcacagagggctttactggataatctcctcacacatctgccaactcaccccgccgcccacggttttgtgcctgaacggagcacagtcactaacgcccagccacacaccggggcaaacgtggtggttcgcgtggacgttgaagattttttccccagcgtgcactatcggcgggtcaaaggcctctttgaagcctacgggtacggcgcccaggtagcttctactctcgccggacttacaacctggcgggctaaacttcctgacggaacagtcgcctggccgggcgtattgcctcaaggagctccaacatcacccgctatcgcaaacctggtatgccggcggctggatgcacgcctagatgctcttgccaagaaggcgggggcacgctacactcgctacgctgatgacttaaccttttccttcccgcagcccccagaaagactgggacgattcctttggtgggtcaatgccatcctgcaacaggagggattttccgagaacgccccaaagagaagggtcatgcgcggtgggggaagacagcgagttaccggcttgaccgtgaatcagagagtggcaatccctcgggaggagagacgaagattcaaggcgatcctggctaactgcaggaaacatggtgtggaaagccaagcccgcgggaggcctgatttccctgcttggttggaggggtacgccgcctacgtccggatggttcatcctgagctgggtgccaggtggcagagagaggtgaaagagcttctaggacgctga

SEQ ID NO: 13874 - RNA, 1404 nt, synthetic construct
  source 1..1404: mol_type = other RNA
atggctctcgccgaactgctgcttgacttgaaagagctcctgcagaaacccgatgaaaacgctgacgctatcgtgaaactcttagagcagcacgccgatctggcggagttcgaagtggctagggccgtggcaggcagagccgttgaagtaggggtggagaggaggctgaagaacgtcgacccaaaagagcgtctcgctgcggtgcgaagcctgtcaggactttttcccagggcacctgctgcccggctgttaagaaagatggtgaaagacccctccagatccgtctcggctgcagctcgggctggagtcagaaggctgaagttggcagatgtggccctgccagattccaggtggacccctgacagagaatcccccttggtgcccggcggatggaaccctagcggatggtgggctggcctgtttggccggtcttcaaagccgcctcccaaggtcagtctgcccaagctgagctctcgtgctgatgtagccaaactcgtcggcgtgacagaagaggagctgaccgcctttatgcgtccgggcagtgcgtcagggtcagggtacgttgagttcgatgtccctaagcggtccggtggaactcgcaggatagccgccccacgtgcgaaacttcgcactgcccaacgcgctctcctagaccaagtgctgagtaaaattccccttcatggcgccgctcacggctttgcgattgaccggagcgttgtgacaaatgcccagttacacgtgggggccagtatcgtcgtgaaggtggacttggaggagttcttcccttctgtccactacagacgggtacgcggcctgttcgaggcctacggttataataccgaagtggcatcaacgctggcagggctcacaacgtggcgagcaaaacttcccgatgggcgagtggcatggccgggttgtttgccacagggcgccccaacttccccagcaattgcaaatatagtttgcaggaggctcgatgccagactcaccgcactttgtgcccggtttggagccacttatacccgctatgcggacgacctggccttcagcttccagaagcaacctgagcgactgggccgcttcctgtggtgggtaaacagcatctgccagcaggagggctttagcgagaacgatggtaagaggagagtaatgagatctgggggaagacgcatggtgaccggactagttgttaatcagaaagtttctatcccacgagaagatcggcggcgctttaaggccatcttacacaatgtgaagaagcatgggctcgagtctcaagctcggggaagagaagacttcaagagttggcttgagggctacgcttcctgggtcaggatggtgcatcctgaactaggtgccaagtggcagcgagaagtcaaagcattgacacgcggtcaggggtga

SEQ ID NO: 13875 - RNA, 1422 nt, synthetic construct
  source 1..1422: mol_type = other RNA
atgggccttggggagttgctcgtagacctctctagactgctagccgatccagcaaaaaatgctgccagcatctacgccatgttggaagctaatgccggcttagcggagttcgaggtagccaggttttatgtggccgatgcgatgacagccgacgtcgcagagcggctgaaatctgtggatccacgcgaacgagtcgccgctgtggatctggtgaggctcgtctgcccccgtacctcagctgccaagcttttgcggtccgtcattaaggatcccgaccccaccgttagaaaacgcgcccgcgcaacagttcggaggatgatgattacggacgtggcactgaaggaccccagattcaagccttccccttgggcacgcggtccatttgctcctggggcatacaatccgtctggatggagttttggagtgtacgggaggaagcagaccggcagtgcagaccgaggggctctaggagcaaaagggttgccgcttctggagggagccgatgacgtggccaggctagttggccttgccgacggaaaggcgctgaggcgatttatgcgtccaggctcagccagcggctcaggttacgtggaattcgacgtgcctaaagctactggcggggctaggagaattgctgcgcctagggctccgttacgaagggctcagcgggtaatacttgaccagatcctcgccaaggtgccagcacatgatgcggctcacggcttcgtcagagggagaagcacggtgactaatgccgagccgcacgtgggacgcgcaatagttatgaagctggacctcgtggatttcttccctagtgtccattatagacgcgtcgtcggcctgttcgaacaactggggtatcccaccgaagcagcatcggcactggctggactctgcacatggaggccaaagctgggagatggtgccgttgcatggcccggtgtactcccccagggagcacctactagccctgccatcaccaacctggtttgtcgcagattggatgcgcgcctctccgcccttgccaaaaagatggggggtgtctacacacggtatgcggacgatctgaccttttccttccccgctgagccagaacgaatcggccggttcctgtggtgggtcgatcagatcgctctgcaggagggctttgttgagaacacaaagaagcggcgtgtgctgcggcgatctgcacaacaaagggtgactggggtggtcgtgaatgaacacccagcgattccacggaaggaccgccgtagaatcaaagccgtgctggccaacgtgaaaaaaaacggcttagccgccgaagctagaggcaaccccgactttgaggcctggctgcatggctgggtagcctacgccactatggtgcagcccgctctcggtgctcggtttgctgcagccttggctggagttgccccttga

SEQ ID NO: 13876 - RNA, 1452 nt, synthetic construct
  source 1..1452: mol_type = other RNA
atgcacaccctggtggacctactgattgagttaaagacgttagctacagcaaccggggacgctaatcagctagcccgaattaatgaactcttttccaaccctcgtgcacccgccgaattccaggtgggacggcacttcgtggcccgcttgcttgttccgcaggcagaggccgcaatggcgagttttgacccagctgacagactgtccgccatcgagacttgccgaacagtgttccctcgctctatagcagcccgcctccttcgccgtgtcatcaaagaccccgatcccaaggtgagatcttctgccaaacgggccgccagtgccctgcgtttggacgatgtcgcccctccagacatcaggtatcgcgtagaacgggacagtcccctggggagacacaatcccacgggctgggcattcggcatttttcccacggatgatcatcctcaaagaaagactaaacaggctacaaggcagaccgccctggacgcgcatcaactcccaaaactcgcgaatgtggccgctgtcgctcaactagttgggatcgaccccgacgccctggttcggatgatgaggccaggcactgaggctggtagcgggtatgtggagttcgagatcccgaaggccaaagggggcacaagaaggattgccgcaccaaggacccccctgcggaaggtacagagaaaaatccttgacgacatactcgcaaagctccctttacacgatgcatgccatggctttgtggtcgatagaagcaccgtgacaaacgccactccccatgctagggcagctctggtcataaagattgacttgaaggatttcttccctaccgtacactaccgccgcgttaagggtctgtttcagcacctcggctacaacgaagaggtgtcggctaccctggcagggctgaccacttatcggccgaagctgcctaatggccatgtggtgtggccgggagttcttccacagggagcccctacttcaccagctctagccaatctggtatcccggcgactggaccagaggttatccaaactcgcagaaaagtacggagcctcttacacacgatacgctgacgatctcactttcagcttcaaaacccagccagaactgagaatcggacgatttctgtggtgggtcgatggcatttgtcagcaggaggggttctcagaacgggccgataagcggagaatcctgagagcaaaacaccaacaaagggtcacaggtttggtggtcaaccagaaggttaacgtccctagggaggatcgccgtaggtttcgcgctatcctgcacaactgtgccaaacatggcttggagagccaagctggttcacttccacccggcgcggattttaaggcttatcttgcaggatacgccgcgtatgtgcacatggtggatcctaaattgggaaaacagtacctggcccaggtggctgcgctcattggtaaggattga

SEQ ID NO: 13877 - RNA, 1455 nt, synthetic construct
  source 1..1455: mol_type = other RNA
atgcagactctcgtcgagctactcctcgagctgaagactctggcagctgaacccgatggccctggaaaactcgagagaatcaacgccatgttcgctaatccgagagctcccgccgaattgcaggtgggacgccactacgtgtccaggttactcgttccgggggttgccgcccagttggcttctcttgaccctgcgcacaggcacatagcgatcaccacagccaggcttgtctttccgcgcgccacggctgcacggttcttaagacgcttagtgaaggaccccgacctgaccgttcgcgttgctgcaagacgagccgtgagcaagcttgggctccatgatgttgcaccccctgacgtgcgttatcagatcacctcagacagtgccatcggcggccataaccccaccggttgggcatttggaatttttccaactgatgatggacctcggcggaagcctaaaccagccacaagggccaccgccttagcacagcacggactgcccgccttggctactcgtgccgatgtcgcagcgcttgtaggtgtggacccccagggtctggccaagctgatgcgtccaggagtaggccctggctccgggtacgtggaattcgaaatcgctaaggctaagggcggtacaagacgaattgccgcaccacggggcccattgcgcaaagtccagcgcgtgctgctggatcggatcctggcaaaggtcccactgcatgacgcctgccatgggttcgtgccaggcagaagtaccgtgactaacgcgggaccgcaccaacgggctgccatagtggtcaaactcgatctcaaagacttcttccctaccttgcactaccgcagagttaagggtttgttccaacatcttggatacaatgatgatgtggcgggaactttggccggcctgacgacataccgaccaaagttggagtcagggctggtagtatggcctgggatgctaccccaaggggctcccacatctcccgctctggcaaatctcgcatgccgcagactggaccataggcttgagcgactggcggcgaaatatggcgccagatatactcgctatgcagatgacctgaccttcagctttgctacaatgccagaagtcaggattggcaggtttctgtggtgggtggacggaatttgtcagcaggaagggtttaccgagcgtgatgacaaacgacggattctgcgggcaaagcaccagcagagggtgacaggcctggttgtgaatgagagagtcaacatccctagggaggaccggaggcgattcagggccatactccacaactgtgccaaacatggggtcgcaagccagacgcgggaacacgaggactttccagcttacctggccgggtacgctgcttatgtgcacatggtggatcccgttctcggcagacgctatctagacgaagtggccagactgcttgcccaagagcctaggcggggttga

SEQ ID NO: 13878 - RNA, 1446 nt, synthetic construct
  source 1..1446: mol_type = other RNA
atgatcgggacattagtcgagttgctcgtcgagttaaaaacgctagttgcgtccagtgacaagaacaagctggacaaagtgaacaagctcttcagcaaccccaaagcgccagctgagtatcaagtgggtcgccactttgttgccagtaagcttgaaaaggatgtggaggtgcaaatatccgatcttgatcctaggcagcggaaggctgccgttcagaccgtgatgctggcttttcccagaagttctgctgccaaattactgagaagggtcgctaaggatcccgacatgaccgttagaagcgcggcccgccacaccatcaaaaccttggctctgaatgatgtggccccaccagacatccggtatgctcccgacatgggcgtcatcggacatggaaatccaacaggttgggcattcggcatttttgctcatgattggcgaagcgacagaaaacccaaaaaaccgtctaaggtcactgccctggacgcacataaactgccaaagctgaaatctgtggccgatgtggcagctctggtgggaattgaactggatgatctgcctgcccttatgaggcctggcgtcggaccaggttccggttacgtagagttcgagattcctaaggccaaaggaggcacacgcaggattgccgcccctcgagctccattgcgtaaggtccaacgggccatactggaccagatcgtaggcaaggtgccagttcatgaagcatgccacgggttcgtaaagactagaagcacagtcacaaatgctgcaccccaccagggatcagccattgtggtaaagctcgacctcaaggactttttccctactgtccactaccggcgtgtccgcgggttgtttgagttcctcggctacaacgcagaggtggcaaacgtgcttgccggccttaccacctaccgcccgaagctggatgatggtacaatcctgtggcccggcgttttgccacaaggggcacctacgtccccggctattgctaatctggcatgtaggcggttagaccatcgtctcgaccggctcgcggccaagtacgatgctacttatactaggtacgcagatgatttgaccttctcattcaagacgtcggaccttaaactgggccgctttctctggtgggttgacggaatctgccagcaggagggcttcaatgaaaggcctgacaagaggcgagtgctgcggtcaaaacaccagcagagagtaaccggcattgtggtgaacgccggggtccatgtgcccagagtggacaagcggcagttcagagccatgctgcacaactgtaaaaagcacgggctcgaatctcaggcccgcgggaaagaagattttgaagcatatctacgagggtacgccgcgtatgtgaatatggtggacccccctctaggcaaaaagtttatcgcccaggtggaggcagttctgggtggaactcccgggggatga

SEQ ID NO: 13879 - RNA, 1449 nt, synthetic construct
  source 1..1449: mol_type = other RNA
atgcagacgctggtcgagctcctgatagaactaaagagccttgctgacgcgccacacgacgacggaaagctagaccggattaacaaactgttcgcaaacccaagagctcctgcagagtaccaagttggtcgtcattatgttagtaagttactcgctccctccgttgaagcgaacctggattctatcgatccagctcagaggctcgccggaattgggacagccacggctgtattctctaggaatgttgccgctcgctttctgcgccgcgtggtgaaagatcctgacggcagagtacgtgctgctgccgcaaaagccgtcaaacacctgggcctgacagatgtggctccgcctgacgtgcggtacaagatagacccagattcggagctgggagggcataaccccactggctgggcctttggtatacacccgaatgacaagtcacgccagcggaaacctaagaaacccagccgggtgaacgccttgaaggagcttgaccttccacgccttgcaggagtggctgatgtagcaaagctcgtgggcgttgccgagggcgaattggcctccttgatgcgtccaggttgtggacctggcagtggatatgtggagttcgagattccaaaagcgaaaggtggcgctagacgaatcgcagctccccgaaccccccttcggaaggtccagagggccatcctggataaggtgctggcaaaaatccccctgcacgaggcatgccatggctttgtgcccggacgatctaccgtcacaaatgcccggcctcatcaaggcgctgccatcgtgattaagctggatctaaaagatttcttccccaccgtgcactatagaagggtgagagggttgtttgagagccttgggtacaatgaaaaggtcgccagtactctcgccggcctcaccacatacaggcccaaaatcggcgacaaaactgtggtctggcccggagtattaccgcaaggcgcccctacttccccggccttagccaatctggcttgcaggcgtctggacaagcgcttggaaatgctcgccgcgaagtatgaggctacatatacccgctacgcggatgatctcactttctcattcaagaaggttccagactttagaattggtcgctttctctggtgggtggacggaatctgccagcaggaagggttcaccgaacgagccgagaaacgacggattttacggtccaagcaccagcagagggtgaccggtctggtggtcaacaaaaaggtaaaagtgcctagagcagataggcggagatttcgagccatcctgcataattgtgcaaagcacggactggaatcacaggccagagggcacgcagacttccctgcgtatctggctgggtacgccgcctacgtcaacatggtcgatccagcattggggagaaggctgctcgacgaggttgcacgccttctgggggaaagcaggggctga

SEQ ID NO: 13880 - RNA, 1533 nt, synthetic construct
  source 1..1533: mol_type = other RNA
atgacgcaggccgccactagcgttctgtcccctattgaactgatactcaccttgcgcacactgctggccgatcgcgcatcgaatgctactctgatcggggagctcctcgagaggcatcaggacatggcggaatatcagattgctcggttttacgtcgctcggcacctgatcccacaggtagaagcactcttgagcgagctggacccccgccaacgtttggcagggatagagctggtccggtttggcttccctaggactctcgctggcaagttgttaaggcgggtagtgaaagacccagatatcgcggtgcgcaaacgcgctcgctccacagtgaagcgactaggccttgatgacgtagctccccccgatacaaggtatgatgcccggcgctcctcacttggaagaggaaaccccgcaggctgggccttcggactgttcagaaaccatgctcgctcagattggggaagacgacccagaccagctaccagggttgcagcgctcggagcacaaggccttcccccattagcctcttccagtgatctgtgcaaattgttaggtgtggaggccagcgcccttgtgagattcatgcgtcctggtacccagaccgggagcgcgtacgtggagtttgagattccgaaggcaaaaggcggcacacgacgaatcgctgcacctcggggtcccctcagacgagtccaacgcgtgctgctggaccagattttatctaaggtgccgcagcatgaggccgcccatggcttcattgcagggcgctccactgttagtaatgccagaccccaccagggagccgctctcgttgtgaagacggacctgaaagatttttttcccagcgtacactacagacgtgtggtcgggatcttcactatgctgggctatggcgagccgatggctagggcattagcggcactgaccacctataggcctcagctaccggccgacgaacctccaccatcagacgctgccccttctcctagtgatgctgcccgaccaccagaacctgcacgtggcagggtgctatggcctggcgttcttccccaaggtgcccccacaagtccagcgctcgccaatcttgcttgccgtcggttggacgttcggcttacacggctcgctgcgcggtatggtgccacctacacaaggtacgccgatgacctcacctttagcttcccccaaccaccccagtttgccatcgggaggtttctgtggtgggtcgacggtatctgtcagcaagaagggttcctggagcacccagctaagaggaagctcctgcggaaaaagactcagcagagagtgaccgggctggtgacgaaccaggaagtccacgtgcctagagcagaccggcgcagattccgagccttgctgcacaactgtaaaaagcatggggtggcttcacaggcaaagggaagggatgacttcgccgcctatctggccggatacgccgcctacgtccagatggtccagcctgaactgggcaaagcttgggcagccgaggtggcaagactgctaggagagtctgcttga

SEQ ID NO: 13881 - RNA, 1440 nt, synthetic construct
  source 1..1440: mol_type = other RNA
atgaaccctgtggaactcattctcgaactgagagggttactcgccgacgcccaggcgaatggggcaaagatccgggagctgatcgagagccatcaagacatggcagagtaccagatcgcccgcttttatgccgctagacatctggtgccccaggtggaggcgttgatatccgagatagaccccaaacagagacttgccggtgtggagttaatccggtttggattccctcgcacgctggctggcaagctgctacgccgagtcgtgaaagatcccgacatcgaagtgaggaagagggctaggagtacagtcaagcatctagggctggaagagattgccctgcctgacacccggtatgacggagcgcggtcgattcgcggaaaatttaacaccactgggtgggccttcggcctattcgccgaacacgctcgcagagcttggaatcgcgtgccaaagaaggccacacagatagcagctctgggagcacaggggctcccggttcttgccagcattgctgatgtgcaagctctgttaggcgtcgacgcagcaggcctggcacgacttatgcgacctggcacggaatcaggctcagcctatgtcgaatttgagattcccaaagcaaaaggaggcaccagacggatcgctgcgccacgtggacccttacgtcgtgcccagagggctctgcttgatcagatattggcgaaggtaccacagcacccggccgctcatggctttgttgccggtagatccactgtcacaaatgcccgacctcacgtgggagcagccttggtggtgaaaacagaccttaaggatttcttcccaaccgtccattacagacgcgtaatcgggctgttcgagctccttgggtacaacgaggctgtagccggggtgctagccgctttgactacatataggcccaagctgcctgacggacgggttgtttggcccggcgtactgccacaaggtgcgcctactagcccggcgctggcaaaccttgcttgccggagactcgacgccaggctgactaaactggcagctaagtatggcgccgtctacacccggtacgcggatgatctgacctttagtttctctgagtcccctaagattgctattggaaggtttctgtggtgggtggatggaatctgtcagcaggaaggcttcgttgagcacccagggaagcgcaaactcttgagagccaaaacccagcagaggatcacaggtttggtgatcaatcgagccgtgcacgttcccagggcagatcgcaggcggttcagagccctgctccacaattgcgcaaagcacggcgtggcatctcaagctaaagggcgtgaaaactttgccgcttacctcgcaggctatgccgcctacgtccagatggtgcaaccagaactcggtaaggcttgggccgcccaggtcgctaaattgctgggtgaggcaccctga

SEQ ID NO: 13882 - RNA, 1470 nt, synthetic construct
  source 1..1470: mol_type = other RNA
atgtctctggctgccttacttgtgcagcttaaaccactgctcgccgctcctcaggagaatctggctgcaataacagagctactgcgcagacaccgggatctggcggagtacgaagtcgcccgtttctgggtgtcccgctttctcggcccccagcttgagaaggaactgcgctctcctgacccacgcgtaaggaggcgtggagcagaagccgttcgctatatatgcactcggaagaccgccgggcatctcttacgcccgcttatcaaagaagccgataccagcgttgcagtcagggcgcgggcttccatgcgagtgttgaagctggatgatgttgccctgcccgattcaaggtatcctgccccgaaaagaggcaggggccaactggggggatggaatgtgaccggctggtgttttgggctgtacccccatatgcaccggtggtggcgaaggcgcggaaaacccgaagagcccactaagaagacgctgctggaaaagcacaagctacccaagctcacctcagagtctgagttgcgcgcgtggctcggcatccaaagaaagaaagacttgctacgcttattgcgtcctgggtgtgggacaggggccccttacgtcgaatttactattccaaaggcaagcggtgggtctaggaccattagcgcaccaagactcccactcaaaaagctccagcgacggattttggatgagattctggcaaagctcccagtccatgctgctagccacggattcgttcgcggccggtcagtcgtgagtaatgccaagccccacctgggtgccgctttggtcctcaaaatggacctgcgagattttttcccgacaatacactttagacgggtggtgggactattccagggaattgggtacgcagccgacgtagcgcaaatcctcgccggactctgcacccataggggcaaacttgcagatggatatgtgctctggcctggggttcttccccagggtgcaccaactagtcccgccatcgctaacctgttatgccggaggttggatgctagactgtcgggtttggcaaaacaagccggcggcgtgtatacgagatatgccgacgacctgacattttccttcagtgccgtgccagataagggaatcggtcggttcgcgtggtgggtagaccagatttgtcagcaggagggcttcgtggagaacagtgcaaaacggagagtgctgcaacggcataaccagcagaggatcaccggcatcgttgtcaactcagccctgcacatccctcgaagcgccagacacacattcagggcgctgctgcacaatgtgaggctggacggacttgcagctcatgccagaggtcggaaagactttcgagcttacttattgggcttcgcttcttacgtgagaatggtgcagcctactcttggccgtgccctgctgtccgacgtacgtgctgtcctgaaagctgacagaagcgcccagaagtcctga

SEQ ID NO: 13883 - RNA, 1467 nt, synthetic construct
  source 1..1467: mol_type = other RNA
atgtcactttccgcactgctcttacagcttaagcctctgttggccgctcccagggagaatcttgccgctattagcgacttactgaggaggcaccgcgatcttgcagaatacgaagtggcccgcttttgggtaagccgagcaatggggccccagctggagcaagagctacggagccctgacccccggacaagaagaaaagctgctgaagcagtgaggtacgcctgcacaaggcggtcagccggaaggctcctacgcccattggtgaaagaggcagacaccggtgttgccgtcagagcgcgaactgccatgcacgcactcagactggacgatgtcgcattgcccgatacgaggtatccaaaaccaaagcacgctggtggattcggtggttataatgtcaccgggtggtgcttcggcctgttcccacacatgcaccgatggtggagaaaaaaggccaaccctaaccaggccgccaagcagaccttgctggagaagcatgggttgccggtactggcaagtgaggcggaactgctcagctggctcgggctgaaaagacggaaagatctgctccggctgctgaggcctgggtgtggaactggcgctccttatgtggaattctctattccgaaagcctcgggaggcacacgtaccatctctgcgccacgtgccagtctcaagaagatacagcgccgaattttagatgaaatcctcgctaagctgcccacacatgccgcatcacacggatttgtccggggacgcagcgtgctgtccaacgctaagccccatgtgggcgcctctttggtcctgaaaatggaccttagagactttttcccgactattcattttagaagggtatgcgggcttttttgtcgcataggttactcctctgaggtggcttccttgcttgccggactgtgtacccataggggcaagttggccgacggatacgtggtgtggcctggagttttgccccaaggggcaccaacttcccccgccatcgcaaatttactctgcaggcggctggatgcgcgactaacaggcctggctcgcggactggggggtaattacacgcggtacgctgacgacctgaccttcagcttcaaggccgttcctgaacgcggcatcggtcgcttcagttggtgggtggatcaagtctgtcagcaggagggctttgtggagaataccgggaagagaagagtgctccgtccacagaaccagcagcggatcactggcattgtagtgaattcaggcctcaacatccctcgtgccgctagacacacattcagggcgctgctacacaacgttaaacatgatggccttgccgcccaagcacgcggcagaaaggacctgcgagcttatctgctgggctttgcgagttatgtgcggatggtgcagccaaaggttgggaaacccttactcgccgaggtccgggcagttctcaaagctgccggccaggctgataagaaatga

SEQ ID NO: 13884 - RNA, 1446 nt, synthetic construct
  source 1..1446: mol_type = other RNA
atgaatctggtgaacctattggtgaccctgagggatgctctcgtggacttcgaggcgaatcgtcagaagatcttaaccctgctcaaaacgcatcagggattatccgaatttgaggtggcccggtatttcgtggcagccgaggctgctccccgtgtacacaagtatctggcctcacgggatccaagagagagaaggatcggagtcgaatgcgcccgctttcttctgccccctaacgatgccgcagctgttctgcgtcgcgcgttggtggaccccgataccagcacccgagatagggctgacagattacttgcccagctagaacggcaagaagctccgttacgggcccgcaggtctacacccgaagccgaactggttgacgcctggggaccgacagggtggagattcggtcgcctgctgaggaatcctcccgcacggaaaaaagcgaaactcgccccagttcctcgagctgtctcagccgtcctgaagagtgaggagacattcctgaaggctattgaggtggatagcgtgtcggccctgcaaccgctctatagagcaggggacgggccaggtgcaccttacgttcggttcgaaatcgcgaaacgaggcgggggcgtaagggcaatactcgcaccccggaaagccctgaagggcgtgcagagagccctgtatgaaaaggtcttgtctaagcttgcgactcacgatgctgcccacgggtttgtcccaggtcgatccgtggtgaccaacgcacgacctcatcagggggccgtaactattcttaaagtcgatctggccgactactttcccacactgcactacagacgagttcagggctattttgcgcgggtgctcaaggctaacgccaaggtggcaacgctcattgccggactaaccactcaccgcgatcgcctggctgacgggtacgtgacaaggccaggggtcatgccccaaggcgctcctacatctcccgcactggcgaaccttgttagccggcgcctcgacgagaggctagatggcttggctaagaaggtaggtttgcgctacactcggtacgccgacgaccttacgttctcctggcacgaagcacctccaacaaggcaggccctggcacgcgtgttatggtgggtcagtcaaatcgctagggaagagggcttcgctctcaacgaacggaagacccgcgtgctgcgtccacaccagcagcagttggtaactggcgtcgtggtgaatgccggccttcatgtgccaagggccctcaaaaggaccctgagagccatgctgcatgaggcacgtgtaaaaggagtcgaggtggcagccagaggtagagctgacttttacaatactctcctcggacacgcagcctgggtcaatgccgtggagcctgcattgggagccagactgcttgccgaggttaaggcactggctgctagagagggcgctgcgcatgtttga

SEQ ID NO: 13885 - RNA, 1467 nt, synthetic construct
  source 1..1467: mol_type = other RNA
atggacctagcgagccttctggtggaactgaaacccttgattgccgatcctgacgcccactgggggcgcattgccgaattaatggaggagcacagtggcttggcagagtctgaggtggctcgccattggctggccgaacggttagctcccaccctcgtcgccagaagtaggtccagagatccaagggatcgtctgcgggccgttgaagctgctcgttgggcacttccggcgcgtgacttggctggagttttgtggcgcctcgctaaggacccctttccgaaagtgcggcacagagccgtgtccctgacccgatcagagggcctcactgacgttgcccttccagaccggttgggacgaggggctaaaccgaaggcccgcatggaccccttcaccaagaagatcagcgtggtggccctgcgcgatggagaagctcagcgaggctggttcctcctggacccagataaggtgagatctctaagaaggggacggaaaagccctgcaaaacctgatctgccaaagctcaagaaccctgccgacgtggcgacactgttaggatgcgcctccgataaggacctggtcaagttgttgagagtgggggaaggccctggttcaccctatgtccgcttcactataccgaaggccacaggcggcgaaagagttatcaccgcaccccgaccagccctcaaacgggttcagcgtgctctgctcgacaagatcctcgccaaacttccagcccatccctcagcgcacggatttgtagcagagcggtctgtggtaaccaatgctacacctcataaaggtagtgcattagtcgtcaaaatggacattgaggatttctttccaaccctgcactaccgacgcgtggagggtttttttcgccagtattatctgggccccgttgccaaactgctggctggcctgactactcaccggacaagactcgaggatggttacgtggtgtttcccggcgaactgccacaaggggcacccacatcgcctgctctagccaatctcctttgccgacgtatggatgcaagactgacagggctggcggctaaggtgggcgcaaggtacacgaggtatgccgacgacctgacgttttcttggcccgtggaccctgaagtgccacttgggcgcttcttctggtgggtggatcaggtccttcagcaggagggttttgccgaaaacgccggaaagaggagagtactgaggcctcaccaacggcaactcgttaccggggtagtagtcaatcacactctgcatcttccaagggaggtgcgcagacgcttccgggcaatcctgcataactgtcagaagcatggggtggaatcccaggcaaggggaagggaggatttccgggactacctccggggcttcgctagctgggcagcaatggtcgatcctgctgagggaaggagattccaggaggaggtcagggccctattaggcgcggccgttaccccctga

SEQ ID NO: 13886 - RNA, 1470 nt, synthetic construct
  source 1..1470: mol_type = other RNA
atgagcctctcgaatttgctgctggagttgattcccctgtgcgaaagcctggacgataattgggaacaggtcgtcagcctactggacgctcaccaagatctcgcagagtatgaggttgcacgcttttatgtgagcagatttacatctcggactatccagcagttggtgcggagtgatgacccacgtcagcgagttaagagcgcccatatggtgagactgacatgtacccagagacaagctgggcagtttctcaggttgctgattaaggacccttgtgcccgtgttcgatcagcagcccatagagccatgagaggtctgaggctggacgacgtggccttgcccgacagcaggattaaaaaacctcacccttaccgaggacagctgctcggcggctggaatccctctgggtggagctacgggctgtttggaaacatgtggtcaatcaggcagtacagaaagcagtctaggaaacccaaaaccacactggccgatctcggcgtccctaagcttgaaacccgcaaggatgtgctttcctggcttaagctgggttccattcgggatcttcggaaactgcttagggccggtagtggaccggggtcaccttacgtttcctttactatccctaaggcgtctggggaacccaggactatcacagctccgcgcctgactctgagacgtgtgcagagacagatcctcgacgagctgctgtcaaaactcccaacccacacggccgctcacggattcgttaagaaacgcagcgtggtaacaaatgcaaaacctcacgagggcgcccaactcgtggtcaagttagacctgaaagatttcttcccaacgatatcctatcaccggataaggggcctattgtgcagatatggcttctctccagaggtcgctgacaccctcgccggtctaactacacatcgggcggtactctcagatggctatgtcgtttggcccggagtgcttccgcaaggcgctccaaccagtccagtactggcaaacctgatctgccggagactcgatagtcggttatccggacttgctaagaggatgggcgctcgctatacgaggtacgcagatgacctgaccttctcgttcgcaaaaggtttagaccataagaacgatttagggcgtttcctgtggtgggtgaaccaggtgtgccagcaagaagggtttgccgagaacgtgggcaagcgaaagatcctccggccaagtgcgcagcagcgcattaccggagtggtagtgaactctggactttccgtgccccgcgccatgcgaaggaccttcagagctattctacataattgtcgaatgcacggcttagactctcaagcccgcggacgccgcgattttcgggcttacctgctgggctacgcatcctacatacagatggtccagccctccttggggaagagagtcctcgcggaggtgagggccttgctgactgcctcagaccggcctagcacatga

SEQ ID NO: 13887 - RNA, 1464 nt, synthetic construct
  source 1..1464: mol_type = other RNA
atgagcctttcgagtctgctcttggagctgatacccctgtgtgaaagcctagacgataactgggagaaggtcttggctctcctcgatgcccataaagaccttgcagagtacgaagtagcacggttttacgtcagccggctcgcttctcggcagctagaccagctcgtgcagtctccagatccaagaaggagaacacaagctgcccactttgtcagactgtgctctacccaacgccaagccggccgttacctgcgagtgctggtcaaggatcccaatggccgcgtgcgatccgctgcccatcgaagtatgcgcgcactgcgcatagacgacgtggccctgccagatggaagatttaggccctcacctcacagacaggcacttggcggatggaatcctacaggctggagctatggcctgttcgggaatatgtacttcgtgcggcaacaaaaggggaagcagcgcaaacccaagcccacactgtcagacttaggcgtgctcaaactccagactcggaaagacgtgcttcagtggcttcagattccatcgctcacagaccttcgtaagctgttacgggctggctccggtccgggttctccctatgttagcttcacgattcctaagagtagtggtgaaccgaggacaatcaccgcgcccagaatgacgctcagaaagttacagcgcaagatcctggatgacctgctgtctaaattgcctacacacgcagcagcccacggattcgtgaagaaaagatctgtcttaaccaatgctaaacctcatcagggggccaaactcctgattaagctggatatcaaggactttttccccaccatttcctattatcgtgttagggggcttctccgcggatatggactgtctttcgaagtgtgcgatacactggctggactcatgactcatcgccccgtactatccgacggctacgtggtgtggccaggtgtattgcctcagggcgccccgacttcccctactttggccaacctaatttgtatgaggttagacgcgaggctttcagggttggccaaaaaagttggagcacggtacacgcggtatgctgatgacatgaccttttcattcgcctccgggatggataaccactccgatgttgggagatttctctggtgggtaaatcagatctgccagcaggagggatttgcggagcatgtttctaagagaaaggtgctgaggccatcaagtcagcagcgcgtcactgggatcgttgtgaacagcggcttgagcgtccctcggcagctgagaaggaccttccgggcgatcctgcacaactgtcggacccacggcgtggctagtcaagccagggggaggaggaacttccgtgcctatctgctgggatacgcttcctacctgcgaatggtgagcccagaattgggtacccgagccctgactgaggtccgagcactactgggctcagatgagtcaagctccagctga

SEQ ID NO: 13888 - RNA, 1479 nt, synthetic construct
  source 1..1479: mol_type = other RNA
atggacgttgcaaccctggtaagcgccctcatgccattgctcgatgacccagtcggcaatagtgccagaatcctgaagctcctgagagatcacaggacattagcagactatgaggtggctcgattcctcgtcgccaagagaaccgaacccttcgtctgcgagctgctgcagtcccaagatcctaagtctaggcggactgctgtgaggtgggtcgggctaacctttgcgcgtgctcccgctgcaagagttctccgggacgccacaaaagacagagcaaaaatggtccgccaggcagcctttcgtgccactcgggagctacggctggatgatgtggccttgcctgacacaacagatcacgctgcttgggttcacgaggccccccagcagcgacgaatgaaccctttcactggagaggaaatggtggttagaggttcaccccccagggcagccaggcaaaggggttacgacgtgtccggctggcgcttcgggctttacccaacggtgaatcgccgtcgggatcctaaaccggcttttagtgcgctccggtcacgcgaggacgtcgagagagtgctaggcgtttccagagcccagctttcaaggatgattcgtcctggtcatgggtccggccggccctatgtcgcattcgagattccaaaggccaccgggggagtgcgcacacttcatgcgccaagacctgcacttaagagggtgcagagattaatacttgaacgcctgctggcacccctggaagtgcatgctgccgcccatgggtttgtacgaggcaggtcaaccatcactaacgctatccctcatgttggcgctaggatagtcgtgaagatggacttgatcgacttttttccgaccattcactttggtcgtctggtcggactgtttcagcactacggcgcgtctgttgatgccgctaggacccttgccgccgtagtgacctatagacccacactgccagatggacgggtgtcttggcctagcgtgttgccacagggcgcaccaactagcccggtgctgtctaacttggtgtgtcggagattagacagccggctgacagcactggctgcttccgtcgctgcccactacactcgctatgcagacgatctgacgttctcgttccgcgaagaacctacgaagggattaggccacttcctctggtgggtgaatcagattattggacaagagggattccgcgaaaacctagggaaacggcggatcctcaggccaaccggtcaactgcgcgtgactgggctcgtcaccaatagtggcctgagcgtaccgagagacgctcgccgacgctttagggccatcttgcatgattgccgtcagcggggagtaaccgcggaggctactgggcacgaagagcccagagcctacctcctgggtttcagcgcctacgtgcagatggttcagcccgcaacaggcgccaaactgcgagccgaggtgttggccctgcttgcgaggcgatga

SEQ ID NO: 13889 - RNA, 1473 nt, synthetic construct
  source 1..1473: mol_type = other RNA
atggacattgccactcttgtggccaccttgatccccctgctgggcgatcccgaaggaaacggcgatgagattgtcagactgttggataggggcagggccctggctgattatgaagtggtgcgcttcctggtggcaaagagaactgaatcctttgttcgtcggctgctggaagaccctgatccaagggtccgcaggacaggcgtgcgatgggttgagctaacattcgcacggtcaccagccgccaaatctctccgcgacgctaccaaagaccgggcaaaagtggtgagacaggccgcttttagggctacccgagcccttcgcttggacgacgtggctctccctgacttgcgggtaccatttagatctctgccaggagaaagtcggaccgcaatcaatccatttacacagaagccaatggtactggaagcctctgcttcccgtcagagacatcggggctttaatcctactggctggcgattcgggctgtaccctgtccccagaaggccaagacggccttcacccgaactgtcagcgctgaagtcccggcgggatgtcgaggtgctgcttggtgttaccggcgaggagttagctcccttgctcaggcccggtgctggtagaggttgtccctacgtagcttttgaagtgcctaaggcctcggggggcacaagaatactgcacgcccccagggctgcccttaaacggctgcagcgcattttactgaagcagctcctcgcgcctcttgagctgcatccggctgcccatggattcgtgccgggacgaagcacagtcactaacgcggcccctcacgttggggccaggatcttggtgaagatggacctagttgacttcttcccaactgtccacttcgggcggctcgttggcctgtttgaacactatggctgcgccagggaggccgcggaagtcttagcaacgatagtcacattcagacccgtactccccggaggtagagtggcctggcctagcgttttaccgcagggggcacccactagtccagttctcagtaatcttgtgtgtcgtcgcatggacgctaggctggctgcactagccacgaaggtcggggctgtgtacactcggtacgccgatgatctgacctttagccttcgcgaggcaccttcccagggcctaggccatttcctctggtgggtgaaccaaatcatcggacaggaggggttcgtggagaatctgcgtaaaagacgcgttttgaggccggcaggtcaaatgcgggtgaccgggatcgtcacgaacacacagctgtctattccaagggaggcacgacgccgattcagggccgtgttgcacgattgcgagcgacgtggagtgagccccgaaaccaccggacatgaggagccccgcgcgtatcttctcgggtttgcggcatatgtggccatggtccaaccagagctgggagcaaaactgagaaccaaggtaagagctctcctcgcccgcccttga

SEQ ID NO: 13890 - RNA, 1473 nt, synthetic construct
  source 1..1473: mol_type = other RNA
atggacgtggctacgttgataagcaaactgtaccccctcctcgacgatccagtcgcaaacagttcgaccatcctgtctctgcttcggcgtgggggagggttagctgagtacgaggttgctcggtctttagtttcaaagcggaccgagcctatggttcggcaaatgctggccgaccctgatccagtggtgagacgacgcgccgtcaggtgggtgcagctcacatttgcatactcccccgcggtccgcattgtgcgtaatgccgcgaaagacaggtcccggatggtgagatcagccgcctttagagccgcccgagcactgagagttactgatgtggctctgcctgcccggagactcgccaaagtgcctgcgaccacgcagcgcgaaggcatcaatcctttcactcgggagcgaatggtaattgccgctcgcagcccatccgtgagggaaatcagggggtacgcccctgcgggctggcattttggcctgttcagggcaaggccgcctagcagacgaccagcaccacctctcgctgcactgaagggccgccaggacgtgttggagcttttgggcgtctccgagcaagaggtcacccgtctccttagaccgggaagcggacccggtacctcttacgtggctttcgaaataccgaaggccagtgggggggtaagaactttgcatgctcctaaacacgtgctcaagagactgcagcggaagattgccactgagcttctcgatcccatcgagccgcatgctgccgcacatggtttcgtgagggggaggagcacggtcacaaacgcccagccacacgtcaatgctcgcctacttgtcaagatggacatcgctgacttctttcccacagtgcactatggccgagttgttgggctgctggaacaccacggagcgggaaaagaggcagccaagctactggcagctattactacatatcgccccaaactcccagacggacgagtgagttggccctccgttttaccccaaggggcccccacatcgccagttctgtcaaacttggtatgcaggcggttagatgccaggctaaccgcactggctgcccggttgggagcaacatacacccggtatgccgacgatctcactttcagcttccagggggatccagagcagggtctgggacgattcttttggtgggtcaatcaaatcctgcaccaggaaggcttcatagagaacatcggcaagagacgcgtgcaccgcccttcaggccagatgcgtgtgacaggtctggtcactaaccagggtctgtctgtgccacgggaagaacgcagacgctttagggctattcttcacgcctgtgaacagcgtggagtctcttccgaaaccaccggccatagtgaacccagggcctatctgctgggctttgcggcatatgtggagatggtgcaacccgaggtaggcaaaaagttgagagctcaggtaaagaggcttctggcaaaaagctga

SEQ ID NO: 13891 - RNA, 1461 nt, synthetic construct
  source 1..1461: mol_type = other RNA
atggacctggccaagcttcttttcaccattaagccactcctcgctgatcctagggcaaacctggcaaaaatagtagagctgctggagaagcataacgacctggccgaatacgatgtggcgcgcttctacgtgagcaaatctgtgcggcctgcaattgaggaaaaactgagttccccagacccaagagagcgaactgccgccacaaagagcataccccgtctgatggggaaaagtgaaggagccgctctcctacgcagagtgtacaaggatgcatccccaactgtgcgtgccgctgccaggtctggggtaagcatgttgggcatcgaagacgtggcgttgccggactcgaggtttcccgctcctcgaaataattggcagagacagggaggttggaacgaaacaggatgggcctttggtctggctgacagccgcgctcgcaaaccaaatcggcgggtacccgaggacattgccagcatccggaaggtttttaaggagctgcagacctctgatgatgtcgccaagaagctaggcatgaaaaaagccaaggagttgaaagccttaatgcggcccggacaacaagccggctcagggtatgtggagtttacggtgcctaaagccactggcggcttacgcaccatttgtgcaccgagagcccccctgaaacgggttcagagaaccattctccgcgagctgcttgcaaaagtccctacacatgacgctgctcacggctttattaacggacgatcagtggtcagtaacgcgcgtccccacgagggagccaagatcgtggtgaaaattgatctcaaggacttcttccccactgtgcacttctaccgggtggctggcacactcaggtacttagggatgggagaggctgccgctagtaccctggctgccatcgtgacccacagaaataagctgcccgatggtacagtcgttatgccaggggctttgccacaaggcgcacctaccagccctgcaatcacaaatatcgtatgcaggaggctggatgcccgattggacgcgctctctaaaaaggtgggagctaagtatactcgttatgcagacgacctgactttctcatttcgcgatgaacctgaaaaaggtcttgggcgctttttgtggtgggtcgatcaggtcatccagcaagagggcttcgttcagaatgcccctaagaggcggatcctgagaggctccaaccagcagcgaataaccggggtagtggtcaatgatggtctttccgtgccgagagacgcccgcagacggtttagggctatgctcgagaacatcaggcgaacgtcagttgatgaacaggcaagagggaaggcggatttcaaggcctacctgaaaggcttcgcttcctatgtcaagatggtgcagcccgaggttggtaagaagctactcgcagaagttcatgcagtccttgccgaagacgtccggaagagggacgcggcaaaatga

SEQ ID NO: 13892 - RNA, 1443 nt, synthetic construct
  source 1..1443: mol_type = other RNA
atgaacttaccggctcttctcttagagctgcgccctttggtggccgacatagacaagaactgggacagaatcgtggaactgctctcaactcacaagcgtcttgcagaatacgaggttgccagattttttgtggcgcggcacgtcgaaagccgagtgaccgaactcttgcgcagtagagatccccagcagcgtgctcggggggtcaagatgctcgagctagcatatccatccacccgggccgggaagcatttacggcatctagtgcgggatgctgacgtcgaggtggcacgggatgcaaccgaggctgtcagtaatctggatatcgatgacgtggctctgccggatttccgcctgaaaccgccaagggatcctcggcatggatggggtgggtggaatcagagcagctggcggttcgggtttcctctcgccgactgggtaagaaggaaaaagcgcgtcgggcccaagaagctcaaactccccaagatcgccgataaagccgctttgttcgaactgttgggtatagccgacgagaagcactacaaaaggctgattaggccaggagctcagtctggcgccccctatgtggaattcacagttcctaaacgatcaggtggagagagaattatctccgccccacgggctgaactgaagcgcgtacagcgaacaattctggacaaaattctggccaaaattcctgtccacgacgccgcacatggcttcgtgcctggcagatccactgtgactaatgcgcagccccacgtaggggcttcccttgtagttaagatcgaccttaccgagttttttcccagcatccatttccgaagggtgtatggcctcatgggttactatgggtacgaacacgaggttgctacagccctggcggccctgatgacgcacagaatcaaactcgatgacggaaagaggatggtagaaactggccttgttccacaaggagctccaacgagccctgccctggccaacatagtgtgtcgcaggctggatgcaaggctctctggattggcacagcgggcgggagctcgatacaccagatacgccgatgatttgacattcagttttgccgatgcaccccctgacaagggcctaggcaggttcctatggtgggttgacgcagtgtgccagcaagaaggctttgtcgagaatgcgggtaagagacgcgtgctgaggccctcgcaccagcagagagtcacaggcgtggtcgtgaactcacaactgtctgtgccccgttctgaacgtcgaaggtttcgggccatgcttcataactgcagacataaaggcattgccagtcaagcaaaacagcacggacgcgacgaggcagagttccgcgactacctgaccggcttcgcttcctatgtcaaaatggtgcagccagagctggggaataagttagccggcgaggttgctgacctgctgaagggagcatga

SEQ ID NO: 13893 - RNA, 1437 nt, synthetic construct
  source 1..1437: mol_type = other RNA
atgctgctgccaaacctgatcctggagctgcgcggactgctcgatgatcctgaggcaaagctcgagaggatcgtcgagcgcctcagggcacatgacgacctagcggagtacgaggtcgcgcgccattacgtggctaagcggttggaaccagtgatccgtgcttggttagcctcgcctgacccacgagtcagggtcgaggctatcgccgccgtgcgacaaaccttttccaagcctgctgccgcgaaggtgttaaggcacctcgtaaaagacgcaaccctgtccgtaaggggcgcagccagaagggcagtggcagaactgggactcgatgatgtggccctcagaaacacgaccatgcgcgaaccccgcaggagttcatggcctggtggctggaacccaagcggatggcagtttgggacggggcggaatcgtggacggcctaagcttgctccagctcccgttcgggcagggttaccggcactggctgacgtggacgccttggctgtgtggttgggttatgagggcgcaggcgaactgcggagattcatgcgacccggtagcgaaaccggctccccctacgtggatttcgagatagccaaagcccgaggaggccagcgcactatatccgcccccagagcgcccctaagggctattcaaagaaagatttacgctgaactgttagcaaaagtgccagtccacgatgcagcccacggattcgtagtcggcagatctactttgacaaatgctgcccctcacgttggggcaggcctgcttatcaaaactgacatccgagagttctttccaagcatccattattggcgggtgagagggctttttttttcactggggtatggcgaagaagtggcttgggccttggccgccttgtgcacaagacgccccgttattgaccccgagggggagagacgtgttgcttggcccggtcttctgccgcaaggagcccctacaagtccagcgcttgccaacctggtttgtcgacgcctggatgccaggctgtctggcttcgctgccaagattggcgcaaggtatacacggtacgcggacgatctgtcattctctattcacgatccgggacgggcacagggattggaagtggggcgcgtgctttggtggatagaccagattcttcagcaagaggggttcgccgagcatcccggcaaaagacaggtcctccgcccgcataggcgtcagctggttaccggaatcgtcgtgaatgatcaccctactgtgcctagagatgcccggaggcgcttcagggccattctacacaatgtagctcggagagggctcgccagcgaagctcgtggtcgagacgactttgccgattatctccggggctttgccgcatacgtggagatggtccagccagaactcggtgctcggtgggttgctgaggtagacgcgctgctgcagagtgcctga

SEQ ID NO: 13894 - RNA, 1422 nt, synthetic construct
  source 1..1422: mol_type = other RNA
atgctgctggcagacctgattctcgagcttagagagctgcttgtggacccccgagccaatttcgaggtaataatcgaccgtctggctgcacacgacgacttggctgagtacgaggtcgccagacaatacgtggttcccgccatcgaaggcctaatccgcgaaagattggacgaccccgatccacaggtgcgcgtacaggccattgtggcggtgagacagtgcttttcgaggagcgccgcggctaaactccttaggcatctggtcaaggacgcgaacctgagcgtaagaggagccgcacgcgaggccgtgtcttctcttggcttcgacgaagtggctttaccgaacgctgattttaaccctcggcaccagcgctggaatttgggcggctggtacttcggtacaggggactggagaagacctggcttggctccacaagcagtccgggcagcccttccaagtctccccgatgtggccgctttggccagctggctcaatattgatgatcctgctgagctccgacggtttatgcggcccggtagtgacaccgggagtccctacatcgatttcgaaataccaaaggctaagggcggagtgcgggtcatatctgccccaagagctcctctgcgagcaatccagcgcaagatttatgccgagctgctggcagcaattgccaaccacgacgccgcccatgggtttattgccggccgcagcacagtctcaaacgcggctcctcacgttggcgctaggctggtactgaagactgatatccgggaatttttccccactgtgcattattggagagttaggggactgttcagatggctgggattagggtccgttgcaggcgagcttgctgccctgtgtacacgacgacccgtggtcgagcgtaacggccaacggatggttgtctggccgggggtgttaccacagggagcaccaacgtcacctgccatcgccaatctcgtgtgtaggcgcctagacgctcggctccagggtttggccgagaggctggatgcgcgctacaccagatacgccgatgatctgaccttctcattccacggatccgacgggggtggagaacctggagtggctgtagggcgggtgttttggtggattgatcagatcttacagcaggaggggtttgccgagcacgcaggtaaacgccaggtgttgcgacccggtggaaggcagctagtgaccgggatagtggtcaatgaaaggcaatccgtcccaaggccggttcggcgcaggttcagagccatcctgcataattgcaaacgtgatggactggcatcccaagctcatgggagggatgacttcgcagactatctccggggctttgccgcgtatgtgcagatggtccagcctcagctgggccaacgttgggttgcggaagttgaagcactcctcgccggcaggtga

SEQ ID NO: 13895 - RNA, 1446 nt, synthetic construct
  source 1..1446: mol_type = other RNA
atgctgctggcaaatctcattttcgaattgcgacccctgctcgatgacccagaagctaacctgaggcagatagtcgctcggttgcgggcccatgacgacttcgctgagtatgaggtcgcaagacactatgtggcgggcaagctggagggggtgattagatcgtggttagctaaccccgatccgcgggtcagagctgaggctattgaggcagtacggcaagtcttctcccgtcctgccgcggctaaactgctacggcatctggttaaggatgccaccatctcagtgagaggagcagcaaggcgagcagtcgatgagctggggctggatgatgtcgctctccgcaacacttctctcgcagttccacgatctcctaggggcaggggggggttcaatcccaccggatgggaattcggcactggtgcccatcgtggacgcccaaggcttgaacctgctgccactcgtgcgggattgcccaccatcccagatctagcagccttaacctcatggctccgcatcgacgctgacgggcttagacgcttaatgaggccgggcggccatacaggagccccttatgtcgatttcgaaattcccaaagccagaggaggccgcaggaccatctctgcacccagagcccctctgcgcgctgttcagaggcagatactggcggagatcctttccaaggtgcctactcatgatgcagcccatggtttcgtgccaggccggagtaccgtcacacacgcaaccccccacgtaggagcacgcctcttgctggccacagacatccgggacttttttcctacaatccactattggcgagtgcggggactctttttcaccctcgggtacggtgaggctgttgcaggcgctctagcggcactgtgcacacgcagagacgtgataaatcccgaggccgaagcccctacgaggagggtagtttggccagggtggatgccccaaggagccccaacatccccagccattagcaacctggtctgtcgtcgcctggatgcgcgattaagtggcctggccgccaaactaggtgcccggtacactcgatacgccgacgacctgagctttagcttccacgacccggaacttgtggagaggctggagatcggtcgggctttttggtggatagaccagatccttcagcaggagggctttgccgaacatctcggaaaaagacagattcttcgtccgcacagacggcagctggttactggcttggtggtgaacgaccaccttacggtgccaagggatgcgcgcagacgctttagggccattttgcacaattgcaagcagagaggtgtggccagcgaggcaaatgggcgagacgacttccctgattacctccggggctttgctgcttacgtgcacatggtgcaacccaagttgggggctagatgggtggccgaagtagacgccctgctggtggatcacgcctga

SEQ ID NO: 13896 - RNA, 1491 nt, synthetic construct
  source 1..1491: mol_type = other RNA
atgctgctggccaatttgattctggagttacggcccctgctggcagacccacaggctaatctgccccagattaccgccaagcttagagaacaggaagattttgctgagtacgaggttgctaggcattacgtcgcaaagaagctggagcctacaatccgcgcctggctggacgatcctgaccctagggtaaggctggaagctatcgccgcagttcgacgaacgttctccaagcccgccgccgctaaggtactcagacatcttgtgaaagatgcccacttacgtgtcaggggggtggctcgggaagtcgtattcgagctgggcctggatgatgtcgcccttcgggataccacttttagggtgccacgtaatcctgctggcggagggggatggaacccgtctggatggcactttggcaccgggtcccaccgaggtcatccaagactcgcgccagaagcagtccgcgctggtctacccgacttgcccgacctgccagcccttctgcggtggttgagccttgacgacgaggccgcattgcgacggctgatgaggccaggatcagccgctggagccgcttatgtggatttcgaagtcccgaaaaaatcgggtggcacacgcctaatctctgccccccgagcgcccttaagagccgttcagcgcaaactgctggcagatatcctggcccctgtaccttgccacgacgctgcgcacggctttgttccaggacgctccacagtgactcatgcggcgcagcatgtgggcgccaagcttctcctccagaccgatattcgggatttctttccctcaatccacttttggcgcgtccgtggtttatttttcactctcgggtatagaggcgacgttgcacgcgcactcgcagcactctgtactcgtaggcccgtgattgccgccacaaggacagacgagcggagagtcgtgtggccaggggttctacctcaaggagccccgacgagccccgcattgtccaacctggcatgccgccgcctcgatgccagattaagtggactggcagctcggcttggggctcggtattctcggtacgccgatgacctgagcctgagcttccacgacgatgaggccctcgccaagctagacgtgggcagagcattctggtggatcgaccagatactccaacaggagggcttcgctgagcatcctaagaaaagacggattttgaggccacaccgaaggcagcaggtgaccggaatcgtggtgaacgaacatctggctataccgagagacgagaggagaagatttcgcgctatgctgcacaactgtagggcgcacggcttggacagtcaagcaaaagtgtgggcccaagccagaggccacgatcctgagcatgaaggcctgcgcgccgacttcctggcctatttgcggggttacgctgcttacggggcgatggtgcagcctaagcttggggcacgttggctcgctgaactcgatgccatggtgcagccagacaccccctga

SEQ ID NO: 13897 - RNA, 1365 nt, synthetic construct
  source 1..1365: mol_type = other RNA
atgaacccggtagaagctatactggagctcgagcggctgaaggccacaaagcccgtggatttggccgccgttgccagggtcctcgaaggagtagaaggcctggctgaggaagatatcgtagggactgtggcattcgagctgatcagcccccgagcagtgtttacccttttaaagagccctgagccctctgaacggttggctggcgtcgagcttgttgcaaggctcgggagactgcatgccgggtcctttctgcgccatgtggtcaaagatcccgaccctcgtgtggcctcatgtgctcgccggcaccttacccgtctgagactgccagaggtcggtctaccactgcctttgccttcgtttgccagggcctttgccagaccgtcctggaccgtcgcaggttggcggtttggagcagcacctcggttctctgacgctagatacccggttcgtgctgacctgagtagtgctgccagagctgaggcgcatctccgagtgcccctggcatctctaccatccctgcgccgctacgccgagtttacagtccccaagagacggggcggcgtacgctcattagccgcacctcatctggcactcaaacaagtccagcgccggcttctggacgcggtgttatccaggcttgccgtgcaccgtgcctcaacggctttcagttctgggagttcagtcgtgaccaatgcggcggctcacgttggcagagccatggtcattaaactggacctgcaggattttttccccagcattcacgaagagagggtgcgcggattatggggagcactgggggctgatcgccaagtagcccacgccctcgctaggctaacaacatatagaccacgccttgcgtccgggagcttgtccaccgtggcagtgcttccacaaggggcccccactagtccagccatcgcaaatctcatcgccaggaggttggacgccagactggctggtctgtctaaaaagtggaaagcttcctacaccaggtatgcggacgacctcacgttctctttcgccgaggagcctagacaggttggccggttcctctggtgggccaacgccatttgccagcaggaaggattcgtggagaacgctagcaagaggcgagttatgcgagccactggccggcaacaggtgacaggcctggttgtgaatcagagggtgactttgcctcgacacgtcaggagaagcttcaaggcaataatccataactgcgaacgccacggcgtggctagccaagctagaggacgacccgactttgaacagtggctactgggtttcgctgcgtgggcagccgtggcacaaccagatgtgggagtcgattggctccggcgggtgaaacaggttttgggccgttga

SEQ ID NO: 13898 - RNA, 1551 nt, synthetic construct
  source 1..1551: mol_type = other RNA
atgagtgcctcacagtccgccccagcgtggttgttgcttcccttacccgctaatgcagatgctgacgccatcctgatcgcaactattgagcaatatgcaaccagtcttccgcaggagtttaaaaagcttcacgacgcactggacgaagtgcgggcactagcgagctacgagccggctgtaaatagaagcaacaccctggtctgggagaagttggagacattactgaccgctccggaaggaacagcacggatcgctctgattagatacgctcgggaacatatgccagagcgggcctgcgccagggtgttaaggagactggccaaggatgccgatatgaatgtcaggcgtaccgtggctaaggccattcggaaggcgaagatacaggaagtggctattcccgccaagaaagacggcgattgggatccctctggttggttgctcccagatgaagtgtcaaaagtgacgcggcataaaactggcaagagagcccaggagaggtccggcgtacctgcactgactaagctggccgaactgagaaaactcctcggaattaagtccaccaatcaactgggtttctttttgctcgcatccgatcacaaaggaggcccctacacaactcataaaatccctaagagggacggctctgatcgccagatatgcgctccaaaaaagcaactgaagtgggtgcagaaacagatcctgaaacacatcctcagcaaagttcccccgcaccctgccgcacacggttttgtgtcgggccggtctacggtatcaaatgctactccacacgtgggggccgagctggtggtcaagttcgacctgaaagatttcttccctacagtgcattattttcgagtgatggggctttttgccagcctcggctatccagttggtaactgtatgtttggaactgacgatggcgcaaatcagatcgcccctgtcctggctcggctttgttgttacacccccgatcctaagcagtggggctctgcagcattgcctcagggggctcctacaagccccgcgatctcaaacctggtttgtcgccgactggacgccagactccaaggccttgccgagacgaaccacggcacctacacaaggtatgccgacgacctgacattctccttcccaaaggctgagggaatgaacttagggaggttcaggtggtgggttgaccaagtctgccagcaggaaggcttcgtcgtcaatcaggagaagttccgtgtgattcgcgacagtcagagacaggtcgttactgggatagtggtcaacgatgcagtaagagctccccgtgaactccgcagagagattagggcgatcctccataactgcgaaaccaaagaccttgagagtcaagctaagcgacaccctcgctttcgcggaaatgttccagcctttagccagtacctccgagggatcgccgcctatctaaacatggtgcaacctgaacatggagccgcgttgctgcgacgcgtgaacgaactactggggggacccatagagggggataccccatctcaggaccagggtaaagctggagacgcctga

SEQ ID NO: 13899 - RNA, 1548 nt, synthetic construct
  source 1..1548: mol_type = other RNA
atgagcgcaccccgttccgcccctgcttggttactgttgcccttacccgcaaacgctgatacggacgctggactcatcgccacagtcgagcagtattgcgcaacactacccgaagcgtttaaaaaattgcacgatgcactcgaccacgtaagggcactcgccagctatgagcccgcggtgaacagggccaacgtgcttatatgggagcatctggaagccctgctgtccgccaccgagaagaaggcaaggttggaacttatacggtacgcccgcgatcacttcccggaacgggcttgtagtcgggtgctgcgacgcttcgccaaagaccctgacatggaagtgagacgtgtcgtggcacgggctgtgaggaaagccaaaattgaggaggttgcaatccctgctcagaaggacggtgactggaacccaactggttggctgctgccaagcgaaggcctgaagataacccgacataagcctggcacaagaactcaggagcgctctggtgtgcctatcctcgggaagctaaaagacgtgcgaaaactgctgaacattaaatctcccaatcagctggggttttttcttcttgcctctgaccataagaatggtccatatacaacgcacacaattccaaagagagatgggtctgaaaggaagatctgtgcacctaagaaacagctcaaatgggtccagaagcaaatcttgaaacacattctgagtaaggttccaccccatccagcagctcacggattcgttaatggtcgatcaaccgtgtccaacgccaccccgcatgtaggcgcggaactgatcgtgaagtttgacctgaaagactttttccctaccattcactacttcagggtaatgggactttttgcatcgttcggctaccaggtcgacaactgcatgttcggcactaaagatgatgccaaacagattgcccccgtgcttgctcgcctgtgttgctacacccctgatccaacacagtggggaactgccacactccctcaaggggcccccacctcaccagctataagcaatttggtatgcagaaggctggacgccagactcatgggactcgcgaaggctaataaggggacttttaccagatatgccgacgacctgaccttctccttccccaaggccgaggggatgaacttaggcaggtttcgctggtgggtggatcaggtctgccagcgcgagggatttgtggttaaccaagagaagttcagagtgattagagactcacagcggcaagtcgtcaccggcatcgtggttaatgatgccttgcgagtcccgcgggagctgcgtagagaactacgggctatcttgcacaattgtactactcatgatattgagagtcaagccaagcgccaccccaaatttaatggcaatgttccagctttcacgcagtacctccgggggatcgcagcttacctgaacatggtgcagccggaacatggaggcgcgctccttaggcgcgtgaacgagttactgggagggcctatcgagggcgctgatgagacaccagatgtcaaggccggcgatgaatga

SEQ ID NO: 13900 - RNA, 1551 nt, synthetic construct
  source 1..1551: mol_type = other RNA
atgagtgcgtccccctcccctcctgcatggctactgctccctcttccagccaatgccgcacacgacgccgccctacttgcttccgtcgaagaacactgcactaagctgccacgcgacttcgctaagctccagaaagctctcgagcgcgtaaggtacctggcaagctatgaaccggccgttaacagggccaatgcactggtctgggaacagttcgaggccttacttagcgctccagaaggtcgggacaggatcgcactggtgggctacgcaagaaaccacatgccagtccgggcattagcccgcgtgttacgtcggctcgcgaaagatcctgatatgactgttagggggcagatcgcttatctcatcaaaaggtctaaaattcgcgaggtcgccctgccggctaagaaagatggtgattggaacccaaccggttggatgctacctgcagagcgggggcgaccaagtcgaattaccaggcacaagaccggaaagtccgtacaggcccggacaggcgtgcccttgttagccaagctggcacaactccgagccctgctgaatatcaagtctccgaagcagttgggctatttcctgttggcctctgattacaagaacggcccctatacaacacatgtaataccgaagagagacggcagtgatcgtaagatttgcgcacccaaaaaacaactcaaatgggtccaaaagcaaatcctgaagcatatcctcagcaaagtgcctccacaccccgctgcccacgggtttgttaacgggcgcagcaccgtctctaatgccacgcctcacgtgggtgccgagcttgtcgtaaagtttgacctcaaggacttttttcccaccgtgcattttttcagagtgatgggactgttcgcgagcatcggctaccccgtgggcaattgtatgtttggcactgatgacgattccaatcagatagcacctgttctggctagactctgttgctacacacccaaccccaagttgtggggttcagccacccttcctcagggggctcccacaagtccagccgtgagcaacctggtgtgtagacgtctggacgctagactggcaggcttggcagaggctaacaaaggaacctatactcgatacgccgatgacctgacattctcattcaagtcagcggagggaatgaaactgggccgattcagatggtgggttgaccaggtctgtcagcaagaaggatttacggtgaatcagcaaaaattcagagtcattcggtcttcacagcgccaggtggtgaccggcatagtggtgaacgcagggttgcgcgtgccaagggagcttcggagggagctgagggcgattgtgcataattgcgagaaacagggcgttgaatcgcaggcggctcggcatcccaattttgggggaaacgttggcgccttcactcagtatctacgcgggattgccgcctacctgaatatggtacagcctgaccacggtgctgctctgttgcggagagtgaacgaacttctcggaccagccgctgacgcggatgatgctgaggccaagggagggggagcctga

SEQ ID NO: 13901 - RNA, 1548 nt, synthetic construct
  source 1..1548: mol_type = other RNA
atgagcgcaacgactaggaccggcccggaatggctcttcaggcctctgcctgcaaacgccgaccatgacgacgctgttattaagaaagtggagcagcactgctccaagcttcccaacgagttcctgaaattgcaaaaaaccctggacgatgtccgcgcttttagtagctacgaaccctgtgtgaatcgcgccaatgaacttgtgtgggagcagtttgaggccctggtcaccaatccagatggtaagtgccgtcgtttgctgatcgggtatgcgacagctcacatgcctgagcgtgctgcagccagagtcttacggcgacttgcgaaggatccggatatggaagtaaggaatcatgtgtctagggcactgcgcaagtccaaaatcagggaggtcgccctgccacacaagaagggaggggactgggatacatccggatggcttttgcagagtgaggagactaaagttacgcgacataagccaggtaagagaaccttggaaaaaaatgaactccctgtgctcacaaatcttgcgcagctgcgcaaactcctgaatataaagtcaaccaaccagctcggctattttctgctagcctcggacaacaaagacggcccctacaccacacacactatcccgaagcgggacgggtcagatagaaagatttgcgctccgaaaaagcagctgaagtgggtgcagagacagatcttaaaacacatcctttccaaggtaccaccacaccccgctgcgcacggattcgttaacgggcgcagtacagtgtccaatgccggaccccatgtaggtgcagaactcgttgtgaagtttgatctaaaggaattcttcccaaccgtgcactacttccgggtaatcggactgtttgcatctatggggtatcctgtgggaaactgtatgtttggaacagaggataagagcaatcagattgcacccgtcctggcacggttgtgctgttacacgccagatccaaagaaatggggctctgctgtcttacctcagggcgcccctacaagccctgccatttcaaacctgatgtgccgacgcttggatgccagattagggggcttggccgaggctaacaagggtacctatacccggtacgctgatgacctcacattctcattccccaaagctgagggcctgaacctcggcaggttccgatggtgggtggaccaagtctgtcaacaagaggggtttactataaaccagcagaagtttagagtgatccgcgacagccagaggcaagtggtcaccggaattgtggttaatgacaagctgcaggtgccaagggagctgcggagggaactcagagctatactccacaactgtgagaaaactagcgtcgaggaacaggccaagcggcatcctcggtttactgagaacgttggcgccttcagtcaatatcttagagggatcgccgcctacctgaatatggtgcagcccgaacatggtgcagccctactgaaacgagtgaatgacctgattggcaaacctgagggcgaaactccccccaaagaaggtgagcagtctaaaaactga

SEQ ID NO: 13902 - RNA, 1530 nt, synthetic construct
  source 1..1530: mol_type = other RNA
atgagtgccactcacacaggcccagagtggttgtaccgtcctctcccggccaatgccgacttcgacccagcagccttagccaaagttgaggaacatgccgcagcattgcccgctgcttttgcaaaattgcaaaccgcccttgacgccgtgagggcccttgcaagctacgaaccttgcgccaatagggccaatgagctggtgtgggagcgattcgaggcactggtggcggacccagatggacatcatcgcgcggctctactgcgttacgcggtggctcacctcccagaaagagcagctgcacgcgtcctacgtaggctcgcaaaagatcccgacgtgagcgttaggacgcgagttgcccgcgcattgagagcctccaaaattcgagaggtggcacttccacaccgcgaagccaacaactgggacacgagtgggtgggttctgaggacggaggataccaaggtgactcgccacaagacaggaaccagggcgcttgaaaaagccggcctgccagtggtgaccaagttagccgatttgagaaagttacttaacatcaagagcactaatcagctgggatatttcctgctcgctaccgacgctaaggacggcccctacacaacgtataccatacccaagagagacgggactgatagaactatctgtgctcctaagaagcagctcaaatgggttcagaggcagattttagaccacatactgtccaaagtacccccgcatccagcagcccatggcttcgtccctgacaggtcaactgtcaccaacgcagggccccatgtaggagccgaactggttgtcaagtttgatctgaaggaattctttcctactgtgcactactttcgggtgattggactgttcgcttctatggggtacccagtcggcgactgcatgttcggcaccgctgacacatcaaaccaggtggcccctgtattggcccggctctgttgttatacacccgacccgaagaaatggggtactgctgtgttgccgcaaggggctcccacatctcccgccatctcaaacctgatgtgcagacgccttgatgctcggctggccggactggcagaggctaacacaggcgtgtataccagatatgccgatgatctcacattctcctttaagagcgctgatggcctgaatctcgggagattccggtggtgggtggaccaggtgtgccaccaggagggctttaccgtaaaccaggctaaatttcgagtaatccgggattcccagaggcaggtcgtcaccggaattgttgtgaatgagaagctgcaggtgcctagagagctccgccgggagcttcgagccatcctgcataatgtcgaaaagacctctgtggcagagcaagcgaaacggcacccccgctttgaaggtaatgctggcgcattcgcgcagtatctgcggggtgtcgccgcctacctgaacatggttcaacctgaacacggtgctgccctactgaaacgggtcaacgagctgctcgggacaggtgatgcggacggagatcctacaccatcgtga

SEQ ID NO: 13903 - RNA, 1566 nt, synthetic construct
  source 1..1566: mol_type = other RNA
atggccagtgttgtcgccgagattatcagagaacggtggtttcagctgcagattagggccaacgccatgaatgttatcgagcgagctcccgcttggctgcttaggccactccccgtccacgcagtcgctgatgacaagctgaacgacagaatcgacaaattggcggccaagttgcctgagagcctccccagactccaggccgtgctggatggagtgcaaatgtaccgcgagtatgagcctgccgtgaatcgggcaagtgcccacgtttggaacgtcttggatcagcttttcgcggccgacgcagactcagtgagagtgtctctgttggtgttcgcagaagcacatatggtagagccagcccgtgctcgaatttatcgacgcctggtcaaagacccttccaccaaagtccgcaatagagctcgccgcttagtccagaggtgtgacttacacgaagtggcccttcccctccagaaggacggcgactgggatcccactggttggctgaggggggtcgtggataggagactctcccggcatgcccagggcaaacgggttcaggagagacatgacgtccccgtaatcgggacgctggctcaactcaggaagcttctaggaattaggagttctcgccaactaggttattttctactggcgtcagatgcagatgggggaccttatgtaagatttactattcctaagagggatgggagggagcgcgaaatctgcgcaccaaaaaagcagctgagatgggtacagcggcaaatactggacaaagtgctcgcgcaggttccagtccatgatgctgcccacggtttcatagtgggccggtctatcgtgaccaacgcatcccagcacaaaggtgcggagatcatcctgaaatttgacctcacagatttctttccaaccatacactactaccgcgtgttaggcttttttgcatccctgggatacagcgtgggcaatggccgattcgggaccaatgactctagcaagcaggttgcccctacgctggcccgacttgtctgttatactccagatccacagcagtggggcgacgctagactgcctcaaggagctccgaccagccccgctatttcgaatcttgtgtgccggagactcgatgcacgccttgctggactcgctaagcggaacgaggcagtgtacactcgctacgccgatgacctgacattctcattcaggaaggcgaccggcgacttaggccgtttccgttggtgggttgaccagatctgtcatcaggagggattcttggtaaaccagaaaaagttccacgttattcgtgcctcacagagacagctggtgacaggaattgtggtgaacgatgagctgcatgtgccgcgagacgaaaggcgtcggtttcgggccatacttcacaattgcaagacacacggtctggattcccaagctagggggcatgcccaatttgctgaatacctgcggggcttcgccagctatatccacatggtacaaccggacgaaggcgcagaattgttgcaggccgtggaggaactgctcggacctgagacaggggaagatggggtgccctga

SEQ ID NO: 13904 - RNA, 1488 nt, synthetic construct
  source 1..1488: mol_type = other RNA
atggccgatgtcctcgacgtgccagagtggctcctccgtcctttacctgcgaacgcctctgccgacgcaaagctccacgctgaaatcggaaggctggccagcaacctgccagccagtctggcagagattgccaaagcattggaggccattaagaattactctgaatacgatgcggctgcaaattgggcttccgcacacgtttggcaagccgtggcgaagttcagtgctgccgatttgccgggagtgcgagtgggcctgcttaagttcgccgcggcccacatggtagctaaggcacaggcacagatctgcaggcgcctcgcaaaggatccagctgtggctgtaagaaggagggctcgaaaactggtggagaacgccggttttcatgaggtggccctcccagatacggctgatgggccctgggatgccacaggatggctgcgtggctctgccacaggggtgctatcccggcacaaacagggaacaaaaatacaggcagaaaggggactcccaaagctgagtaccgtgggggagcttaggaacctgattggcatcaagtcagaacgtcagctgggatggtttcttttggctactgacgcagaggatggtccttacgtcaagtttacaattcctaaacgggatcagactgagcgcgagatttgcgctcctaaaccccagctgcggtgggtgcaaagacaaattttggacaaaatactcgcaaaggtggctactcatgacgctgctcatgggttcataccgggcagatcgatcgtaactaatgccgcgccccacacctcagccgccttaatcctaaagttcgacttgaaggattttttccccactatacattattaccgggtgatggggctgtttacctcccttggctacaccgtcggaagggccaaattcagcgccaaagacgatgcaagggaagtggcgcccacgctagctcgcttatgttgttatacccccgatccccaccagtggggttctgccttggttccacagggtgcccctacctccccagcaatcagcaacatcgtatgtcgccgactggacgcccggttgagaggcttggccgaacggaacaagggtgtctatacacggtacgctgacgacctgaccttcagctttctgaaagacgaggtcgaacttggccgatttagatggtgggtggaccagatctgtcaccaagagggcttctttgttaatcaggctaagtttagagtcatccgctgctcacagcgccaagtggttaccgggattgttgtcaatgacgcgctccgaatcccccgggaggaaaggagacgcttcagagcaattgtgcacaattgcaagaaacacggaatcgaagcacaggccagaggccataaaaagttcctggactatctgcgcggctatgccagctacattaacatggttcatcctgaagagggggcagagcttctggaggaagtcgaagctcttgccggcccggagacaggggagtga

SEQ ID NO: 13905 - RNA, 1482 nt, synthetic construct
  source 1..1482: mol_type = other RNA
atggacccacttccagccgcgcctgcatggctactacgaccccttcccgcgcatgccgtggaggatgagaagctccacgcaagaatagataagctgtgccaaaggttaccagctgggttggcggagctcggcgttgcacttaaggccgttgaaatgtatagggagtacgacgccgccgctaaccatgccagtatccatgtgtggcgtctgctggatcaattttactcatctcccgcgagcgtccgctcacagctgctcaatttcgcccgacagcacatggttcctcaggcccagcacagaattttgcgacggttggcaaaagacccctctctcgccttgagacgcagtgtccggcggctcattgagcgtggagctgtccgggaagtggcccttcctctggaggctgacggcgattgggacgcacaagggtggctgcggggtaacagcctacccctgactcgacacaggcagggaagacaggctcagaccgatcatggtgtaccacggctggctaagttggcagacctgaggaaactgttggacattaggtcggccaaacagcttggctggttcttactcgcaactgatgctgacaatggaccttacaccacttttaaaattccgaagcgaagcggcagtgagaggctgatctgtgcccctaaaccgcagttgagatgggtgcagcgtaggattctcgacaaaatcctggctcctgtagccccccataatgcagcccacggcttcataccagaacgctccaccgtgactaatgctgccgtgcacacgggagcggcagtggttctcaagttcgacctgacagatttctttccaaccatccactatttccgggtggtcgggctttttgcctcccttggatatcatgtgggagacggccggttctcatccgatgatgatagcaagaacgtggcaccgacgttagctcgcctgtgctgttatacacccgatccacaggactggtctgctgccaaattaccacaaggcgcccctacctcccctgcaatctcaaacctatgttgccgcagactggacgccagactgcaaggtctggctgagcggaacgggggcaaatacacaagatatgccgatgacctgacattttctttcgaaaagcccgaactggctctcggacggttccgctggtgggtggatcagatctgccatcaggagggtttttttatcaatcaggcaaagttcagggtgattcgcgcttcccaaaggcaggtcgtgaccggaatagtcgttaacgacgaactgcgagtccctagggaggagagaagaagattccgggccgttctgcacaattgtcgccaacatggggtaaagagccaggcgaaggggcacaaaaggtttaaggaatacctccgtggctttgcaagctacgtgcacatggtacagcccgaggaaggcgctgaactgctccgccaggtggacgagctgttgggtgccgaagggcagagttga

SEQ ID NO: 13906 - RNA, 1428 nt, synthetic construct
  source 1..1428: mol_type = other RNA
atggccgatagtcccgtgctgtccatccctacctggctgctgcgcccactgcctatcaacagcaaacgcgatagcaagttggagagtcaaatagaaaagctggccaaaaacctgccggggtcacttgctcagttgacaacagagctttctaaggtcaaaatgttccgggaatacgattctgccgccaatctggcttctcgccatgtgtgggtcagtaggtaccattttttaaactcatctcttgacgaagaccggaaagcgcttttggagtttgcacagctgcacatgacacccacggctaaagcccggataattcgtaggctctccaaggatccccagatgggggtgagacgtgcggtccataggatcatccagaaggccccaccttacgaggtggctctacctgaggcacgagacggtaattgggatgcaagtggatggaccagaggagttcaaccaggcagattaatgcgcgtgcgccgaggacaaaagaagactcagaaagagtgggggctccccgggctatccaccgtaaagcaactgagaactctgctgggcatcaagtccgagaaacagctggggtacctgcttttagcgaccgacgaaggcgggggcccttatacaagattcagcattcagaaaaggaatggctccgacagggagatctgcgctcccaaaccccagctgctgtgggtgcaacggaagattctgcacgagatattagacaaggttcccttgcatgaatctgcccatggcttcgtgcgcggacgtagcactgtgaccaacgcgacaccgcaccgaggtgcagcctttgttctgaagtttgatctcgagaacttcttccctaccgtccactattacagggttatgggcctatttgctaatctcggttattccatgggaaacggacgcttcgaggctcgggataagagccgacagatcgcccctgtgctggcaaggctctgtgtctttgttgaagaccccaatgcatgggggactggtttcatgccacagggcgctccgacttcgccagctattagtaacctggtgtgtcgcgggatggacgctcgacttgccggcttggcagaacaggtaggcggagtctacacacggtatgccgacgacctcactttctcttttccagaaaccagccctgtgaatgttggccgcttcaggtggtgggtggaccagatttgccaccaggagggattctttttgaatcagagcaagtttcgggtgatcaggcggtcccagagacaaacggtgaccggaattgtagtaaatgatgagctcagagtcccaagacgtgaacggagaaggttcagggcaattcttcacaactgcaaagcccagggggtggaatcacaggcccgaggtaaccccgcctttagagattatctccggggcttcgcctcatacctcaactga

SEQ ID NO: 13907 - RNA, 1521 nt, synthetic construct
  source 1..1521: mol_type = other RNA
atgactgatactcccacctggctgttacatgctttgccagccaatgccgtcgtggacgagaagctaaatgctacgttatcagctctggccgccgcattggccgacaatagagataagccactagttaccgctggcctgttgacagagatccagggccaccttgctcacgcccaaccgttcgcggcatatgaggccgctgtgaacgggatcgctggtcaggtgtggcagctgtttgaagctgtgcatcagaggcaaaatcgcccggctaaactcgcctttctgaatctggtggtgaggcatctcactccaggggcgctcgcccaattgtgccgtcgttgggccaaggacgcagaccctgcaattcgcagagctgtaggccgcgtgattgagacaggggccattcacgaggtcgcccttcctgcgaccaaagacggagcctggagccctgccggttggagaaaaggcacggtcgaggtcgacctttccagacacaaggtcggtacagccgtgcaagaagcgaattccgtgcccccactggcaaaccttagacagcttcgcgaactgctcggcatacgtagtgcaaagcagttgggctacttcctgctggcctctgacaaagatgacgggccctacacacggtttacggtgccaaaacggggtggcggagaacgggtcatttgtgcacctaagcctcagctgaaatgggtgcagcgccgaatacacgagcggatcctgtctggggttcctctggccgatgcagcgcatggatttgttcccggacgttctatcgtgagtaacgcggcagctcacgttggtgcagcagtcgtggtgaagtttgatctgaaggacttcttcccgaccatacacagctacaggatgattggcctattcgcccgcatgggctactcagtaggcactgcaaagattgctaccgctgatgaatcagcaagtgtggcccccgttctcgcacggctgtgttcctacactcctgatccccgagcctggggaaaagcccatgctccccaaggggccccaacatcgccagctgtctccaacctcatctgcaggcacctggatgctaggctcgggggactggctaggaaactggggggggtgtatacccggtatgccgacgatttaactttcagcttcgcggccacaggaatcgatttggggagatttcgctggtgggtcgatcaagtttgccagcaggagggattcgttatgaacgccgataagtttagggtgatcaggcggagccagagacagctagtcacaggcctggtggtgaacgacggcgtacgaccaaccagggaacagcgccgagcattcagagctgtgctccataactgtcggagaaatggcgtcgtaaccgaagcccgaggtgaccccaggttttctcagtatttacgggggttcgcatcctacctccacatggtgagaagcaccgagggagctgacctggttcgccaggtagccgagctccttgaccctcctggcggtggagaagacaagccctga

SEQ ID NO: 13908 - RNA, 1566 nt, synthetic construct
  source 1..1566: mol_type = other RNA
atgagggaagatacacagagcacgtcaagtgtggtccttcacgaggcagagcttaagaataagcttcctattggggccacattcgacagcgcactgctcgagcagatatccaccctggccgatcagctccccgacagtatgtcagaactttataaggtgttatccgacatcgacatgctggtggagtttgatgctgccagagtatttgttgtgagactagtgctggcgaggttgcgagtactgacccacgctgaggagaaacaaagactggctctgctggatatggccagggattacatgactacagatgaatgtgtacccgtttgtaggagattcgcaaaggacccatcagcccatgtgaggggaagagtcaagactctgattcgaacgaaaaaacctaaagatgtggctttgcctctcgaggagggagaaagatgggatgcctccggctggtccaagggcatcaatgctgatcccgaacaagaaacatcccctctgttcaagcacgaacgcggctctcggattcagcgcaaacatggagttcccgaaatcgagactgtcaaggacttaaggactctcctgaagattaagtcagaaaagcagttgggctatctcctattgtccaatgagcttgaagacggcagtgggccctacaccctatttgagatcccaaagaaggacaaatcgcccagactgatctgtgcaccgcggcagcctctgaaaggaatacagcgtcgcattctggataggatcctcagcggagtgccgccacacgaaaccgcacatggatttgtgccaggtcgctccatcgtgaccaacgcggccgtgcaccagagcaaggagattgtcatcaaattcgacctcgagaacttcttcccatctatgcattactatagagttatgggcttgttcgctcaactggggtacgacgtgggagagggcttttttcagagcgacgacgagagtgaagctatcgcaccggttcttgcaagactgacaacctataccagcaatcctaaggagtggggccggggatatcttcctcaaggcgcgcctacatctccctacatagccaatctaatctgccgaggactggacgcacggctgtctgggttggcccgttcactggatggggactatactcgttacgccgacgacatgaccttttcttttgccgagctgccccgcacaaaaatcggtaggttccggtggtgggtggaccaaatctgccagcaggaagggttcgccgtaaaccagaagaaatttcgggtcgtgaggcggagccagagacagatggtgacgggcattgttgtgaacgatactctccgggtcccacgaaaggaacgacggcgctttagggccattttacataattgcgagcgctatgggctcgagagtcaggctcgtggccgcaaggatttcccagcttacctgcagggttacgcgtcttacattaacatggtccaccctgatgaggggcggaaattcattgagcaggtcgaacacatcttgcaattagatcgcgagggtaaactcccaatagagaaagaccccgaaaacggttga

SEQ ID NO: 13909 - RNA, 1470 nt, synthetic construct
  source 1..1470: mol_type = other RNA
atggcagccactaaatcatccatccctgcatgggcctaccgaccgctcccattgaatgcccagcccgccacagaacttattcaacagttagacaagctcgagcagggcctgccaggaagttcttgggagatcctgagactggtgggcgagcaggatggttctgcaacctacgaagctgtggccaatcgcgctatggagattatctggacgcaccttgacgagtgtattgcaaacgaccctcacaccgtacggcagtttgcggcttctcatctccctattagggtcaggaaccgcgttcttcggagactggctattcacccctccttcagcacccgccgatcggtcaggtatcagattaacgagtccgccgtccgcgaagtggctcttcccagtgcccccgatggagagtggaatgccgagggttggttactgaattccaacagcagcactctgatgcgacctagaaagttgaaagctcccgacccaagactgccgaaactgaagaacgttaaagctgtcatgaaggagttgggcatcgtttcaaatcggcagctagggtggatgctccttgcaaccgacgaggacggagggccctaccacacctttgaaatcgggaagcggaatggcaaggctagaaaaatctgcgcaccatgctggcaactcaggcgggtgcaacagaggattctgcacaatatactggaccatttgccaccccatccggcagcccacggatttgtgaagggcaggtcagtggttaccaatgcggccccacatctcggaaaacccttgctactgaagttcgacctgcttgatttcttcccgacaatacattaccaccgtgtgatcgggctgttcgcctccatgggttacggtatgacttctcctttctttgatactgagaatcgcagccgtaacgtcgcgccagtgctcgctaggctttgtacatataccgaggatcctcgggtgttccgagatggaacgctgccacagggagcccctacatcccctgccatcagtaacctgatatgtcgacgcctcgatgcaaggctggacggcctggcacgaaaacatggggccgcctacactcggtatgccgatgacctgacattcagttttgaccaagatgagatttcagtgggccgttttcggtggtgggttgatcagatctgccatcaggaagggtttctggtacaccaggcgaagtttagggccatacgtagctcgcagcggcagagcgtaacaggcgtcgtcgtgaacgaacgcatgagggtgccacgcgatctgcgcagacggttcagagcaatcttgcacaactgcagaaaaagaggcgtagctgctgaagctaggggcgacgccgggttccctagctacttactcggcatggcgtcttatatgtatatggtgaaccccgacgaaggtgggcccgtgctagacgaagttagaaagctcttagcagaacaaggaaactga

SEQ ID NO: 13910 - RNA, 1488 nt, synthetic construct
  source 1..1488: mol_type = other RNA
atggccagccatcgggacaggtatgatgaccgtccgccacttcctgtcggcgctgaaaccaacccagaagatctcgcccgcgttgctgagttagcggcgcgactcccaggctctgtgtctgcactgtcagacttcctacaggcgagggactcttacaacgattttgatcctacccgcttagcagccaacgacgcaatccttgcccgcctgggagccttccatctagccgctgaagggacccaccggcagctgctaaattacgcgcaggcctatatggcccctagcgaggtgatggcagtgtgtcgcatggtgttacgcgggggctctacacgcctgagagaacggtgtgttgatctgctcaggggggcacagcctgatggacttacactcccggctagacaagggggtgcttgggattggactggtctgctgcggggagtagagcggggcagactttttgccaaacagcccagccagagactgttggagagaaatggactgccccagcttaccacggtaggggagctgcgggccatgctgaagctgtcctcccccgagctgctggggtacttgttattatccacaagcggttcaggcggcccatatgcaacctttacaagacctaaaagatccggcggagagagactcatatgcgctcccaacccaaccctgaagcaggctcagagagccgtgttggagaacatccttgccagggtgcccgtgcacgatgcagctcacggatttgttgaaggacgctcgaccgtgacgaatgcccgcgcacaccttggcagggagctcttgattaaattcgacctccggaacttcttccctagcatcacttactaccgcgtcatgggactctttgcccacctcggctattacttggagggcggagtcttctcttcccgggacagcagtagggcagtagctcccacccttgccaggctgacgacctatacaccacccggcgctacttggcgtgcgtcttatactcctcagggggcaccaaccagtcctatcatttcaaatctgatctgtaggagactggacgctcggttgtacggcttggccgcacgaataggtgccacatacactcgttacgctgacgatctgacatttagtatgaatgccctgcccgaatcgggtctgggcaggtttcgttggtgggtggaccagatttgcgttcaggaggggttctttattaatcattcaaagttccgggttatccgcaagcatcagcggcaacaagtgaccggaatcgtcgtcaatgaagctctccgagtccccagggaggaaaggagaaggttccgggccattctccacaactgccgaacacagggtgtggaaagccaagccagagggcgagccggtttccgtgagtggctgctggggtatgcaagttacatgaatatggtcaacccaactcgaggagggcaggcgctggctgaagtgcaagctctcctagccgcagagggcccgtccacttga

SEQ ID NO: 13911 - RNA, 1422 nt, synthetic construct
  source 1..1422: mol_type = other RNA
atgcacgacgaggtgcttctgggacgggttcgatctctggtggcggccttacccggcagcttgtccgaactgggtgcttgtttagcggaggtcgaaagttttgccgagttcgatagcgccgctgtgttggccgctcaggcttttgatgcccggcttgacgatctactgcgccggcctccgaaggggctctttgaattcatgcggagcaacctccctgtggatcagcagctgcaagtctgcaggcgcctagtgaagcatcccaatctgcctactaggaggagggccgttactctcttgaagcgcttaagaccagatgatgtcgctctccccctttcagcaaaaggcgaatggaactggcgaggctggactaggggaacagagcctggacgactgttcaagcacagaagaggagtgaaacgccaggccgaagtaggtgtgcctcaattgaaagacttagaggccctacggaggcgactcgccatcgactcgctgaaacagcttgggtggtttatgacagccaccgccggagagggagcaccatactgctcttttgaaatccccaaacggagcgggggtcttcggagaatagatgccccaaggggacagctgagggccctccaacgaacggtgctgcatgagatcctcagcaaagtggcagtacacgaggctgcacacgggtttgtgcccggtaggtccacattgaccaatgccgctccccatttgggccggaagctcgttctgaagttcgatctgagaaacttcttcccgaccatttcctactggcgcgtcgtggggttactggcctcactggggtacgatgtggggacgggcctgaacgtagtcgaggacagcagtcgggcagttgcaccagtgctggcgaggctcctgacatttcgcgacgacgctaagttgttcggcgcaggctatgctccacaaggggcacctacttccccggcaatatccaacctggtgtgcagaggcctggacggccgtctgtcagggttggcagcgagaatcggaggtacctatacccgatacgctgacgaccttaccttcagtatggatgctgaaccagccggcggactaggccgcttcagatggtgggtggacggaatttgtcagcaggagggcttcctccttaaccgtgagaagtttagggtgctgcgggcctctagacgccagcagatcacaggaattgtcgtcaatgactcacttagagttccacgggaggtccgccgtaaagttcgtgccatggttcataattgtcagaaaaatggtgtcgaagctgagtctaagggggaccccggcttcgtagacaggctcagaggcctggcagcttatattcacatggtgcaccccgaagaaggtcgccctctgctggatgcgatcaagctctttggggaaggcggcgaggatgactga

SEQ ID NO: 13912 - RNA, 1275 nt, synthetic construct
  source 1..1275: mol_type = other RNA
atgctcgacaaactgttgccttatctgcagattttcatcccactctcagttattctgttgttcattgcacagttcctcgaaaagcgtaaaaacgagacaagacaggctgccccaccccgaagaataggagagcggtctgcctcttcccgcaggcctacacgaagttttcctcctgccccggtgaatgccggcgtaaatactacaaacccaaggtgtcctaataagaggcatgcttacatcagagcgccacgcagaccccaaagtgatccatcagccgctgcccgattcgggatcccagcgttgatgaaccggggagacgtcgccaagtggctgggcatgagctggaaacacctcgtatggctctgcaacctctttcacaattgggatcgaaaaggagttgggcactatcacgcctggaaagtgcccaagagagccgggggcgaacgcgttatcactgctcccaaaccctacttgcgggctgtgcagaggaagattctggcagatattctatccagaatccccattgagcctcaggcgcatggttttgctcgcaaccggtcaaccgtcaccaatgcatctgtgcatatccagcggcccatagtagtgaaattggacctcgtcgacttctttccaaccatcacctaccgcagagtccggggggtgtttggcacactgggttatagcgaggaagtgtcgggcgtcctagctcggctttgcacgatcgccccaactgatatgctgcccctcgctaatgacctgcgtcgaagcctgctattacgacggcgccatttacctcaaggcgcacccaccagtcccgccttatccaatctggtttgcagaaggatggaccgtaggcttgccggcttgtgtgcaaagtttaacgcagtgtacacaaggtatgctgacgatctgacatttagcggagatgagaagttcgctgccgccctgggtgatttctttgacattgcttgtaggatcatcgcgctggaagggttccggataaattgggccaaacgccgcataatgcggaagggagccagacaactggtgaccggcgtggtcgtgaaccgcagaacgactcttcctcggggcgaacgcaggcaccttcgtgctcttctccatcactggaggaccaagggggacttcactgcgccgccacacgtggagaacaaagttgcatggctgggaggtaagctggcatacttttccatgattgatcctgcaaagggagcaccgatgcttgcccagttcaaggctctggccagggggagatga

SEQ ID NO: 13913 - RNA, 1308 nt, synthetic construct
  source 1..1308: mol_type = other RNA
atgtttcagtggtcttttcgacccctgaaatatagtgctcaagagtccgatgtgaaacctagtcctccgcccgcctctcgaatacccgattccaggttccagatcacggattgtagactgagatcaggcgagtcaagtgcggtgaacgcgttctggattattggggcgcttatcgccgcatggctggtgttgcggtggctgacaggacgcggaaccgctaggcctgctggagatcccttcgtgacaaaacgcaacccaaagaccggtgaaccggtaccaccaggcagcggcaaaggacgggaacggcttcgagccaccgctactcacaggccgcagctcctggcagaaaatggtcttcccaatattgcccgccgtgatgacttggcacgcgctctgggtattactcggggcacactggactggctggcattccccgacgacagggagcagcctcctcactactccgcatttgccgtgcctaaaagatctgggggttacagggtcctatacgcccccaaaccgaagctcaaggccgcccaacactggatcagaaaggaaattctctcaaagacctttgctgaggaccccgcacatggcttcgttgccggacgcagcattcataccaatgcacagccacatgccgggaaagacatcgtggttacactggacctggataactttttccctagcgtgacctacagacgggttcgcggcatcttccaaagcctgggctatggggaggaggtagccatccccctcgccatgctgtgcactgttaagccagccgaaaaggtgcgcgaattcgtcggcggtcagaggcaccgcatgttaccacagggggccccaactagcccagcacttgctaacctagcttgcaggcacttagatctccgtttggcaggactggctaaaaagttcggctgtacctacacgcgttatgctgatgatctgaccttttctggcgacgacactttcagacggtcgttgaaacgatttttaaagctcctccaccagataatcgccaaggagggatttaaactcaaaaaggggaagacacactttgctcggaggggagcgagacaggaggtcactggcctggtggtgaacgacgggcccagagtccctcgagcctatcgacggaggctcagggcaatcctacataacgctagacgcggggggcttgaggcccaaaatcgggagaagcatcctcactttcgtcaggcactgaggggcagaatagaattcgtccggtccacacatccagacttggccgagaagctgattgccgaattgaatgcgatcggatga

SEQ ID NO: 13914 - RNA, 1167 nt, synthetic construct
  source 1..1167: mol_type = other RNA
atgagtgtgttctggatcgtggtggccctcatcgcagcatggattgttctgcgagcccttaccggcaggagaaccgcacgggttgtgggtgacccgtttgtgcggatgaggaacccaaagaccggggagccaattcctcccggtagcggaaagggtcgaatgcgcttaagggccaccgctgctcaccgacccgaattgctggctgagaacggcctacctaatctagcttcaagagaagagctcgccgctgctttggggatcccaagaggaacactggactggctggccttgcctgaaaggaagaaagaacctcctcattacactgcctttgcagtgccaaagcggtcaggcggctatcgcgtgctgtacgcccctaaggctaaactgaaagcagcccaacactggataaggcgggagatactggcaaagacattcgcggaggatccggcccatggtttcattgccggccgcagcatccacacaaatgccgccccccatacagggaaagacattgtcgtcacccttgatctcgacaactttttcccgtccgtgacctacagacgggtcagagggatcttccagtctctgggttacggcgaggaagtggcaattcccctcgctatgctgtgcaccgtcaaacctgcggcgaaggtacgggagttcgttggggggcagagacaccgcatgcttccccagggagcgcctactagtcccgcactcgcgaatttggcttgtcggcatctggatctgaggctggcaggcctagctgccaagttcggatgcacatatactaggtatgctgatgacctcacgttttccggagatgccgcattcgagcgctctctgaagcgctttttaccattgctccaaaagatcgtgaaagccgagggctttaagctcaaaaaagacaagactcacctcgccagacgtggagcccgtcagaaggtcacgggcctggtggtaaatgatggccccagggttccacgggcatatagacgaaggctgcgtgctatcttacacaacgctcggaaaactggacttgacgcccagaaccgagacaagcacccccattttgctcatgccctgcgcggaagaatagaattcgtaagaagcacacacccacagttggcagccaaacttcttgccgaactgcgctccctggggtga

SEQ ID NO: 13915 - RNA, 1110 nt, synthetic construct
  source 1..1110: mol_type = other RNA
atgaccgaacgacgggccgcgatggggttcttcgattggctcactaggcgcttactgggaagagggaagccagcagcccctccagaggaaagactgggtcggaagcgtcttcgtgctaccgccgctcacaggcctgatctactggctcagaacgggctcccgtccttggcatccagggacgacttggctgccgcactcgggatctctaggggagtcctggactggctagcctttccagagcgcaaagaagaacccccacactatgtggcttttgccgtgcctaaacgcagcggaggatatagggtgttgtatgcccccaaggccaaactcaaggccgcgcagcaatggatccgacgcgagatactggctaagaccttcgcggaggatcccgcccacggtttcgtagcagggagatcaattcatacaaacgcccagcctcacgcgggtaaagacatcgtgattacacttgatctccaggattttttccccagtatcacataccggagggtccgaggcattttccagtcgttagggtacggagaagaagtggcgatcccactggcaatgctgtgcaccgtcaagcctgctgagaaagttcgcgagttcataggcggccagcggcatcggatgctccctcaaggcgcacccacatcacctgcccttgctaacctcgcctgtcggcatctagatgttagactggccggactggccgctaaatttggctgcgcttatactcgctacgccgacgacctggcttttagcggagacgcaacgttcgaacgaacccttaaacggtttctgccgctcctgcatcagatcgtcaaagccgagggctttaagctgaaaaaggggaagactcatctggccagacggggcgcaaggcaagaggtgacgggtttggtagtgaacgacggccccagagttccgagagcataccgacgccagctgcgggcaattcttcacaatgctagaaagaatggcctggaggctcagaatagggagaagcatccacactttgcccacgccttgcgtggccgcattgagttcgtgagatctactcacccccaactggccgcgaggcttctcgcagaattgaaggcattagcttga

SEQ ID NO: 13916 - RNA, 1110 nt, synthetic construct
  source 1..1110: mol_type = other RNA
atgggtttctttgactggctgactcgccgactgctaggagcaggacgtcccacccccaacaggccagagtgggcagaagtgagtgaggaggccggacgctctaagaggcttagagccacggcagctcatcgaccgcaactgctagcacagaatggccttcctcccctggccactagagacgacctcgctcgtgccttaggcatctcacgaggggctctggattggctcgctttccctgataaggccaaagagccgcctcactacagtgcctttgcggttcccaagcgcagcggtgggtatcgggtgttgtacgctcctaaagggagacttaagaaggcccagcagtgggtctaccgtgagatcctggctaaggtaaaaccttccgccgccgcccatgggtttgcaaaaggccgaagcattcacaccaacgccgccccccacgcaggaaaggatattgtgatcacccttgacctccagcacttcttcccaactatcacttatcggagggtgagggggatcttccagtccctcggctatggcgaggaggtggcaatagccttggccatgctgtgcaccgttagaccagcagagaaactccggggcttgttggggggacagcgacatcggatgctgccccaaggcgctccaacttcaccagctctggcaaatttggcttgcaggcacctggatgctcgcctggctggtctggcacgtaagtttgggtgtacgtacacacggtacgcggacgacctcacattctctggagatgccgcgtttgaacgcaccctcaagagatttctgcctcttctgcatcaggtggtaaagaaagaaggattcgaactgcaaaaaggaaagacacatttcgcgagacggggcgcacgccaggaagttacaggtttagtcgtcaatgatggccctcgggtcccaagggcatatcggaggcgcctcagggccatactgcacaacgcccgcaagacaggccttgaggcccaaaacagagacaagcatccccactttgcccacgcgttaagaggtcggattgaattcattaggagcacccacccgcagctggccgtgaaactgctcgctgaactaaaagctttgagatga

SEQ ID NO: 13917 - RNA, 1113 nt, synthetic construct
  source 1..1113: mol_type = other RNA
atggggttccttgactggctcgcaggcctgtttggtggaggacctaccgagagcggtggacgctcgtggggagtgtttgagccaccacctccacgcgagcggaggaaaaagctgcgagcaactgcgcaccatgatcctgatcgcctagccgcccaagacttaccatccctgagggactgcgcagaactggcaggcttcctcggaatttccccgaatacactccgttggctgacccacgttgacgaaggggatgagcccgagcattatgttgcctttgcggtgccgaagcgctcaggggactatcgggtattgtatgctccaaaagctaagctgaaacaggctcaacgccgggtctatgatgctatcctgagtcgagtaccccttcccgacgcagcacacggctttgtgcccaagcggtctatcctcaccaatgccgaaccccacgcagaacagtacgtcgtgatgaacgtggacctgcaggacttcttccctagtataacgtacagaagagtgagaggcattttccaggctttaggatacggcgaggaggccgctatccctctcgccttgctttgtaccgtgaaacccgctgggaagctactggaatatatggggcatgttaggcataggcagctgccacagggagcccccacttctcctgccctggctaacttggcctgccgtcgactggatgcacgcttgggtggacttgcccgcgcatttggggcgacctacactcgttacgcggacgatttaacattcagcggcgatgacgctttcagcgacgctctgggtcgttttgtgaggcacgctcggacaattatcgccgatgaagggttccgggttaatgccagaaaggtccatatcgccagaaaaggcaggcggcaacaggtgaccggcttggtggtcaacgatgctccgtccgtcccccgaagatacagacgggagctccgagccattctacacaatgcccgcacaactggcctggatgcacagaacagacacaaccacccagacttcgccaggcacctgaggggcaggatagcgtttgtaagaacaactcatcctggtcttgccgatcagctccaacggacgctcgactcactgctgtga

SEQ ID NO: 13918 - RNA, 1068 nt, synthetic construct
  source 1..1068: mol_type = other RNA
atgcagactatactgtggctcctcattctgctggcatttctcaaggtggtttccaacatcaagcagcgtatccgcatctttctgaatggagacttcaaccgactgcataaactcgggttgccccagatagaggatttctcacagctggccaactttctgaaaattagcgagacagaacttaactggctcatcgacaagtccagcgccaatccccaaacgggcatttcaagacactatgtgctaaaagagatcagtaagaagaacgggaaaaaaagacttctgcatatcccaaaggctaaactgaaagaagtacagtggataatcctcgataagatcctgaatttgctgtcgtatcacccagcagcgcatgctttttgtttccggaagtcaatcgtgactaacgcagaaaatcacctcggtaaggccattgtgattagggccgatctgaaggacttcttccatactattagaacacaccgcgtgcgcgccattttccggaggttgggctactcttacaaagtagcatacagtctggcgctcttatgcacatccaggttacccaacagccagaaaagagctttgccacaaggtgctcctacgtcccccgccatatctaacctgatcgcatttagccttgatcggagattgacaggactggcccttaagttaggcttcacctacacccgctatgctgacgatctgatcttcagcgggaaccgcaaaatcgtgaaagcccttctgaagaacctaaagaagatagtttccagtgagagatttatcttgaacaaagagaaactcctgatcgccagggctgaacgacggcaaaaggttaccggaattactgtcaatcaaaagctttctattcctaggaatgagaggaagaagatgcgagccattttacacaattccctgaagaccggccttgaaaaacagaacctgattcagcatcctaatttcaaagagcacctccggggcaaactgtcttttttcaagatggtcaatcctgaccaggctcgtccgttgatcgagtcatttaataagaccgtcaaaaaggaactagcgagctga

SEQ ID NO: 13919 - RNA, 984 nt, synthetic construct
  source 1..984: mol_type = other RNA
atggccgcctggctcgcaattacccccgcgaaactgaggtggcttgcctggcccagatcccatgctccccatggagtccgcaagaggtacttcggaccccctgatcctgttcaacactactatgaggcagtgagaatcaaaccggacggcaggaagaggtacctggggtgccccaagcgggagctcaaagaagttcagcgtaaaatacttcgtgggatcctcgaaaagctgccgcctccaccacgcgcacatgcctattgcagaggcaggtcgtccctaaccaatgctagagaacacgtgggccacgcagtggtggtccacttggacttgagccatttctttaattcaatcaacgttaggcgggttgtggggctcttcgcggctttagggtaccccaggcctgtggccgtgactttaggcctactgtgcacataccaagtccacccagaagtaggctgggagttctttaacagataccgcagagtagtacaccgagggttgccccagggtgctccgacaagcccagctctgagtaaccttatctgtcagcggcttgataggagactgtcaggtttagcccggcggtttcacgcccggtatacgagatacgccgacgatctgactttctccggtaaccgggacttcgctaagggactcgagaattttctcaagatggccagacgaattatcgccgaagagcggtttgtgttgagcgagcgcaagctgcgaatagcgcgcaaagggtctaggcagtgtgtcaccggtattgtggtgaacgatcagccaggggtcggacgtacacaacgaagacgcctgcgcgcaattctgcatcactgtggccggggacgccctgaagagcagaatcgaggcaaggaggaaaattttcgcggatatctgcaaggctgggtcagttatgttggaatggtgaacccagctcagggccagaaactgcagtctgcactggagagggtgcgttggccttga

SEQ ID NO: 13920 - RNA, 1203 nt, synthetic construct
  source 1..1203: mol_type = other RNA
atggtgaaatatagatcccccccttttttctacgaagggaacgtgggtttcttgaagtggttaaagaacgtacttttcggcgggggcgaggaagagaggttcaagagcttcgagaaggagatttacatcgagcgcgtgagctataggggggccggcaaaaaagaagtgtcgcgaccgagaagaaacgtacgtgcaagcgagaagattcctcccggaggggaccgtaagctgctaaacgagctgggtatccctattctcgccggtaatcccgacatagctaggcgactcggagtgtctaccggggagttgtgttggctggcattcccaaagcggtttgacaccgtggatcactatagggagttccatatcccaaagttaaatggcggtgaacggcggattctggctcccaagaagaagctgaaggccgcccagagatggatccttaagaatatcctgactgccgagcgcgtcagaggcctcgttcatgaaaacgtccacggtttcaggagagggaagtctgttgctacaaatgcccgtccacacgtgggggcagaagtggtggtgcatctcgacctgactgattttttcgaaaccattactctgccgcgtgtcagaggcatctttcggaagctgggatacagtcacgtggccgcaacaacccttgctatcctctgtacggtctacattggacgggtcgacgaaactaaaaccggctcccgcaaacaggtgttgcctcaaggagcacccacttcccccgcgattaccaacctggtgtgcaataaactggataggagactggctgggcttgccagaaggtacggagtcaaatatacacgatacgctgatgatatcacattttcaggcggaaaatctttttgcaatgcgctccgccggtttctccctaccgtacggcgcatcattagggaggagcgatttacgatcaacgaaaaaaaagtacacgttgcgaggaagggcgcccggcagtcagttacaggcatagttgtcaatcaacagatgaacattccccgcagcgaacgaagacggtacagggctatactgcatcagctacgcaaaatcccacctggcacagagaagccaaaaaaattaaacgcacacctgtccggagtggccgcttatttgtcaatgataaatccagaagccggtcgcaaaatgcatgaggaggtgaagagtgttttcaactga

SEQ ID NO: 13921 - RNA, 1044 nt, synthetic construct
  source 1..1044: mol_type = other RNA
atgggcctcatctcggacttttttaagaatctgtttgggagccctgtcgaaaataaaggaggtgaaaatgagccaacacagaaatccgcgggtaatgactccggaccatctgagctcaccagattagaaatgaataggcttcctcttatagccggacgggcggaattgcttcaagaacttcaaatcagcgataaggaactcgattggtttgtgaaacatcctgagtggcactacactgtagttagcattcccaagaaatcagggggagcacggaccatttacgcacctaaaaagaggatgaaaagaatccagcggtggatcctgagtgagattctgagcaaagcccgtgtcgagggatctgcccacggcttcgcaaagggcaggtctatcactactaatgctttcccacacacgggcacggagatcatagtcaacatagacctggagaacttcttcgactccgtgaagctctggagagtgtactgcgccttccggaactttgggtatagtggcgagctgtcttccattttcgcacgattgtgctgcgtgaaaggagctttaagacaaggcctgcccactagccccgccctgacaaacgttgtgtgtgctatgttagatcgtcgcctgaatgggctggctgtaaagttcggctgtacatatacccgatatgccgacgacatgaccttctcaggcgatttgaaattcaaggcttctctgtcccggtttatcccgatcctgaagaagatcattcgcggtgagaaatttaagattaacaggagcaagatgagaatcacccgaaaggggagtcagcagaaagtcaccggtctagtcgttaacgaaaaggtgaacatcccacgcgagaaaatgagactctggcgcgccattattcataattgtcgcataaaggggctcgagtcccagaaccgggataagcacaaacatttcgcagcgcacttgaaaggcctggtgtcatttgctgcccaggtggcccccgccaagtcagaaaggatgagggaggaactaagtcaggtgacaaagccgtga

SEQ ID NO: 13922 - RNA, 1047 nt, synthetic construct
  source 1..1047: mol_type = other RNA
atggggttctttgacttcctgaaggacctgtttaacccagtaaaaggaggtacaggtggccccaaaccagccggcaacagtccggctagagcactcgcaccccgcaagacatatgctagcccaggagggcctagacctctggcaccaggtctgccccagcttcctactcctgccagcctggccgctttgcttaggatcgcccctgaaaagctggcttggcttgcgaaagagaagggccgtcattacgctacatggaaaataccaaaagctaaggggcatcggaccattgaggcacccaagaagcagctcagagccgcacagagagcaattcacagagagattctctcaaaagtcgcccccaacgctgcagcccacggattctgcacaggacgctcgccgaggacgaatgcggaaccgcacgtgtttcgaaaactcgttgtgaagctggatctgcgcgatttcttctggcaagtcaaacggaatcgagtggctggacagttcagagcgctagggtttcctcccgatgttgccgcgatactgtggcggatttgttgccatcgaggaaggttaccccagggggcacccacttctcctgccttgacaaatatcgtgtgtaggcgtctggacgcacgtttgtctggccttgctaagaagtacaaagcccgctatactaggtacgccgatgacttgaccttctccttcgatgcccccaatctggccgtgcaggaaccactacgcgccatccggaccatcctttccgaggagggctttagtttagcacgggagaagactcggtttctccgccggatgtccaggcaaacggtgaccggcatcaccgtaaactccaagttaagcccaagccgggaggaagttcgatcactgagggccctgctccacgaggctagaaccaaaggccctaaggtggcgaaccgcaatcaggaggaagcctttggcgccagggtcaggggtcgaatcgaagcagtgcgcgctattgacaagtctaaaggggaaaagctcctggccgactatagaagagtcgcttggtga

SEQ ID NO: 13923 - RNA, 1023 nt, synthetic construct
  source 1..1023: mol_type = other RNA
atgggtctgttcgactttctgaaagatctattcaaccccgtcaaaggacctccacctggcaagggaggcccaccagtctctagaccagggtctggagggcgaccggttagacccttggctgcgggtttaccacccgctagagatacaggcgagctggccgcaatcttgagaaccacgcccgagaaagtggcttggctggttcgcgagacaggacggcattacgctacttggcaggttcccaaagctcacggtcgtcggactatcgaggcacccaaaaagcaacttcgaggcgtgcaacgcgctatacacagagagatcctctcccgggtttcaccggcagaagcggcacacggctttagaaaggggaggtcgcctcgcaccaatgccagtccccacgttgccaaggaaatggtcattaagctggacctgcgcgacttcttctggcaggtgacgcggaacagagtggccggactctttcggagcctcgggtaccctgaagatgtagccctcgttttatggcgcctgtgctgccacaaagggaggttaccccagggggcacctacctcccctgccattacaaatctcgtctgtaggcggcttgatgctagactcgctgcagccattcgtagcatgaacggcgactatacacgctacgccgacgacctgactttttctttccgagaagccagactgcctatgccccgacttgccaggtttctgagacgcatcatttccgacgagggctttcgggtggcacctgaaaagacccggttcctccgtcgaagtagtcgccaggccgtgaccggcctgactgtgaacgccaagctgagcccaccgaggagggaggtacgagccctgagggctctattgcatgaagccaggttgaggggtccagaggcggcgaatcgggatcatctgaagggattctcagccgtggtgagggggagaatcgaggcagtcagggccatagatcgcgctaaaggcgaaaagcttcttgcagagtatcgtcgggtgagctggtga

SEQ ID NO: 13924 - RNA, 1029 nt, synthetic construct
  source 1..1029: mol_type = other RNA
atgggcctgttcgacttcctgcgggacttgttcagacccgtgaaaagacctgcaccagatcctcctcctccagcgggtgccaaagccaaggggcctccaaataggggtgcttctccccctcccgcaggacttcccccaatcgaatcgctagccgtgttggctggacgcttaggtatccctcagaaggatctcgcttggctcatgaaaccccgagccaagcactatcacacacatgagatcccaaaagctgacggccgcgtgagaaaaatagagtccccgaagagtcggttgaaaaaggcccagcgttggattctgcgtgagatactagatagggttcctgctgcccccgcagcacatggctttgtgaaagggagaagccccgccactaacgctgcccctcatgctttcaaggccattgtggccaagctggacctgcgggatttcttttggcaggttaccctgcgtcgggctcgcggaatctttgaagccctcggttactcaggcgatgttgccaaggctctcgctcggctttcctgtcgcgacggcagacttccccaaggcgctccaactagcccggcactgaccaacctcgcatgccgaagactggataggcggctggaagctttggcgcgcgcctttggcgccagttacacacgatatgcagacgatattaccatctcacacaggacgggctgcgccccacttgacaggttgctggcgtggacgaagactattctgcgagaggaggggtttcacctcgcgccagagaagaccaggatcgtccggcgggggtctaggcagacagtaaccgggctcactgtgaatgcacgcgtaagcccgccaagaggaaccgtccgggcattaagggcgctgttacacgaagcaaagacaaaaggcgcggccgctgccaatagagacggactgccccacttcgcagcccatgtccgcggaagggtggaagccgtacgcgcagttgaccgagccaagggggagaaactgcttgctgcctggagatccgtcaactggtga

SEQ ID NO: 13925 - RNA, 1239 nt, synthetic construct
  source 1..1239: mol_type = other RNA
atgagtctaaagcgctggttcggaaggtggctggccacagccgaacaccggttagaacggcaaagggccgagaagagaagggcaggccctcctccttggcggtatccagacccgttcaccggagagttgataactcccccagatgatggcgacagggacaggcttgcagcagctggcctgccagtactgtctacacttgaggatctcagccgagcaacagggttgtcctggcagaggctattgtggctcgctgccccttctagtgcctacgcaggcggatcgccacactacacattcttcaccgttcccaaagctcgcggggaaccccgcattatcctggccccaaaaccagcactgaagtcagttcagcgttggattctgagaaacatcctgaaccgcataccccttgccgaccccgtccatggctttcggagaggccatggcacgcgcactaacgccagagtacattgcgggaaggacgtggtcgcgacttttgatctggaggacttcttccacacagtcacctaccgacgagtgaggggtctgtttcggagccttgggtattccacagaactgagtgtcctgttgggtttgctgaccacgtttagacctgccgcattcccctatgactatatgagacacgtgcccaccctggtttggctcaaatcaatgtcaaccgctcggcgtagctggagagggcacccaactacccccccatttctgccccaaggggcccctacgtctccagcactgtccaatctcgtcgctcggcacctcgatcgaagactcgctggacttgccaggcgcttaggggctgcgtacactagatacgcagatgacctgacttttagcggccatgcggagtttaggcacggcttggcccggttcttacctcttgtgaagcgcatcgtgcgcgaggaagggttctacctggccaccggtaaacagaggattcggcggaaaggcggacgacaggtggtgaccggagtggtggtaaatagacgtaccaacgtgccgcgagagacatatagacacctcagggtcctgctccataaggccgcggttcatggtcctgagagcgtgcgcttagaaccggctgcccctactgatcctggagtcctccggccacatctggagggctgggttgcctgggtgtcccacctaaatcccgcccgtggtgctcgcctcagaaggacatttgaggctatcgcatggcccgctccgtctggagaagcgtga

SEQ ID NO: 13926 - RNA, 969 nt, synthetic construct
  source 1..969: mol_type = other RNA
atgctggggatcacattacgcgaccttgcttggttagccagtgccgctcccctgtcaccaccacactacgtcctggctgtccggaagaagagaaatggcggcaagcggctcatcctcatgccaaagaagcgtattaaagctgttcagagagagatacacagacgcattctctctcgccacgcgccttctccctgggcacatggatttgccactggtaggtcaatcaggaccaacgcagccccacacgtcggaaaggaggtggtggcaaaatttgacctgcgcgaattcttccattccataacgttccctagagtacgaggtctgctacgtcagcttggctacgcacccgacgtcgctcgcaccattgccctgctgtgcacgttccatcctgggcgcatccgtgagaggatgaggcctggaggagtgagctacgctgatctcgccgcagcatttcgagccccggggagatatggtttcagacgaatcctaccacaaggcgctcccacttcccctgcactggccaatttggctgccagaggacttgatcgacggttagccgctttggcgaagaggttccgggcggattacacacggtatgccgacgatctcaccttttcgggtggcgcagaatttcaccgcgatctgccccggttcatccctctcctgaggagtatagtgagggacgaggggtattttctggcaagagagaaaactagagtaattcggcggggaaattgtcagagggtgaccgggcttgtggtgaacgagaaacccaacgttccaaggggcacctatcgggagctgaaggccatcctgcacaattgcgtgacaaaaggcccggaaagccagaaccgcgcgaaggtccgcgactttcgggctcatttggccggccgaattgccttcgtgaaatccgttcatctccgtcacgggatgcgattggaagaaacattcagcaggattagatggtga

SEQ ID NO: 13927 - RNA, 1209 nt, synthetic construct
  source 1..1209: mol_type = other RNA
atggatgacggttatcagtttaagaataagcgcgtattcctggaaaatctgcgcaggatcaaccaaagggctggagtcgagcccgagatcatcgatctaattgaagttcgattctggggaaatcggatagaaatcaacgacaaagaactgcaggggttcttgcacaagaaccctcatcttgaccagagggtcttaaattttctggccagttactttttggagatgaaaaggcgcggacttagatgcattttcactccctcccacctggcccatcttctggagattagcctgaagcggcttcactggctagccgatgataagagatcccactatacatgtttcagcgtgaaaaagcgaggtggcggcgtacgcgaagtcttcgcacccaaacccaatctaaaggccgtgcagcggcagattttggatgacctgttacaccgggtgcgtctgaatagccacgccgagggctttcgaaagcgtcggagtattctgaccaacgccaagagacatgtgggaaagaaagtggtcataaagatggacgttaaggacttttttccaagcatcacctttgagagagtgctcggaatgtttgtgtctctcgggtatccacgccaagtggcagtcctgctcacgcgcctcgtgactcataatggcaagctccctataggggctccaacatccccggcgatcagcaacattgtctcacgacgcctggaccgaaggttcagtcggctcggtgaaaaagctgggttcgactactctagatacgcagatgacatcactatatcatctaacaacaaaggcgttaacaggatgatacccttctttaaagaaatcctgagagaggaagggtttgaagctaatgaggcgaaaatgaggatcttaagaagcggcgggaggcagaagatcaccggcattgttgtgaataagaagcctaacctggataagcatgagattaggaaactccgggccgtgatctacaattgcagtcacaaggatcttagacaggaggcaaaacgctgggcagaaaacgagaaaggtttgacaaacccatcatcttatggcttgcgggagttccggtcctccctgaaaggaaaagttaatttcgtgagaatggtaaacccggagacaggcaagcgtctgattgaggctctcgactacaaggggtcgtcattctttcaaacccctcctaaagccgaagtcatctga

SEQ ID NO: 13928 - RNA, 1221 nt, synthetic construct
  source 1..1221: mol_type = other RNA
atggagcaaaaaatggatcatcgatacctctgcaacaacaaggagaagtttataaagaacctgaggctcttcaatcaacgcgtcgaggtcgaacctgagattgttgacctgatcgaggcttatgcccgattgagacttgaccagggcaaagaaattcggtactatggtaaccgcatttccagcaaaaacaaggaactgcaggaatttcttgacaagaataggcacttagatcataggattcttaatttcctggcgtcatatttcctcgagatgcaaaagagaagcttccgctgtgtatttacaagttctcacctggcacattttctcaagatcagtacaaaacggctcaactggcttgctaacgaccgtattaagcactacacctgttttaacatcaaaaagagagatgggaacaaaagagaaatcttcgctcccatgccctatctgaaaggcgtccagaggaagatcctggacgatctgttacagcgggttggcctgaattcgcacgccgagggattcaggaaaagacggtccattctaaccaacgcacggcgacatataggtaagaaggtggtgatcaaaatggacgtgaaagacttctttccatccatcacttttaaacggattttggggatgtttatcagcctgggataccctcggcaggtgtctctgctcttgaccaggctagtgacacacaacggcagattacccattggcgccccaacttcacctgccatcgccaatattgtctcaacccgcttggacaaaagattcagccgtctgggtgataagatgggatttgactatagccgctacgctgatgatataacagtatcttccgataaccgcggcatcaataagatgattccattcttcaaggagattatccgtgaagaggggtttgagatcaatgagacgaaaatgagggttcttagaaacgccgggaggcagaaaatcaccggcatagtcgtgaatgagaagccgaacatcgataagaaggaaatcaaaaaactgcgcgcagtgatatacaattgccaccacaaggacattaaacatgaagtgaaaaagtgggcgaagaaagagaagtccctgaataacccttcagactacactctcagtgaattcaagtctagcctcttgggaaagatcaatttcgtgaaaatggttaatcccaagataggaaatcgactactgaagcagctggggcagctgagtatttga

SEQ ID NO: 13929 - RNA, 1215 nt, synthetic construct
  source 1..1215: mol_type = other RNA
atgtatgatcgacgactgtgcgagaataaggacgtgtttatcaacaacctcagagctacaaatgaacgagcagaggtagaacctgatattgtggaccttgttgaagcctacgcccgcctgaggctggatcaagacaacgagctgcgcttttacgacaacaagatatggattaatgacaaggagttagagcagttccttgataaaaatcggtacgtggatcatcgggtattaaacttcctagcctcctactttcttgaaatgaagaagaggggcttaaagtgtattttgaactcgtctcacttggctcacatcctcagggtccctcggaagaaggttaattggttggcaaatgaccgagccgaccactatgtgtgctttcacactaaaaaaagagatgggagcaagcgtgaaatcttcgctccaaagccttatattaaaaaggtgcagaggcaaattctggatgagctgctgcatcgcgtccgcctaaatttcagagctgaggggttccggaagaaacgtagcgtagttacgaatgcgcggcggcatatctctaaggaggtggtcataaaaatggacgtgagggattttttcccatctattaacttcaagagggtgctgggaatgtttgtgtctctcggttacccgcggcagacctccctgttgctgactcgcctggttactcacaacggcaggctgcctatcggcgcacccacatcacccgcaatcagtaatatcatttgtaggagaatggataagcgcttttccaagctcgggagaaaaatggaattcgaatactcacgatatgccgacgatatcaccatctcctccaacaataaaaagatcaccgggatgatccccttctttaaagagatcatgggcgaagagggcttcgtggtgaacgaggccaaaatgcggatcctcagaagtggaagcagacagaagattaccggagtcgtggttaataagaaaagtaacatagccagagaagaaatcaaaaaactacgtgcggtcatatataattgcggtcataaggacattaagcaggagatgattaaatgggccaggaatgagaaaaagctggcaaacccctacggatatacactcagccagtttaagctctcattgcttggtcgcataggattcgtcaaaatggtcaacccagggattggcaacaaactgctccaacagtttgacacacttagcctgaacgcttga

SEQ ID NO: 13930 - RNA, 1248 nt, synthetic construct
  source 1..1248: mol_type = other RNA
aggcaaaaaatggcgggcggactgcactgcaaagacaaagagtctttcataaagcatctccgtatcataaaccagcgtgctggcgtggaaccagatatcatcgatctgatcgaagcttatgccggcctgcgccttaatcaggacgaggaagttagattctttgacaatgcagtgaatatcaagcacattaaggacaaagagattaaagagttcttcgacaagaaccggagacttgaccacaggatactaaacttcctggcctcttactttatagaaatgaagaagagaggtctgaagtgtatcctgaattccagccacctggtccacctcctcgagctctcgatcaacgagatcaattggcttgccaacgatgggaaaaaccactacagacattttacccgaaagaaaagggacggaggcacccgggatatttttactccccgcgctcgcttaaaagaggtacagcgacatattctggacgatttccttcatagggtcagactaaactcacatgcacaaggattccgtagaaagaggtccattattacaaatgcagcccggcacatcgacaagaatatcgtgattaaaatggacgcgaaagaattctttccctcaataacattccagcgcgtgtctgggatgttcgcgagtctgggttacccacggcaagtctctgtgttgcttaccaagttagtgacccacaggggaaggctcccgatcggagctccaacatcccctgcaatcagcaatatcgtttgccggcgcatggataaacgatttgccaggctgggggagaagatgggcttcgattacagtagatatgccgacgatttgacaattagctccaacaacaaaaagctgacgaagatgatccctttctttaaggaaattatgagagatgaagggtttgaggtgaaagaagctaagatgcggattctgcgaaacagtgggcgccagaaggttaccggtattgtggttaataagaagaggaatatcgagcgcaaagagataaaaaagttgcgcgccgtcatccataactgtaaacacaaagatatccgacaggaggccattacgtgggcaaagcgggagaaaaagctcgatgacccttatgcctatactctccgggagtttaagagctcactgctgggcaagattaatttcgtgaagagcgtcaaccccgaaatggggggcaagttatttcagcaggtaactgctttgcagtttcctgaacccagaaaaatgggttga

SEQ ID NO: 13931 - RNA, 1215 nt, synthetic construct
  source 1..1215: mol_type = other RNA
atgatcgacaaaaccctggcgggaaagaagcaagaatgcatcaagaacatacgctttatcaaccagcgggccgaagttgagccggagattctggatctgattgaggcttacgcaggtctgaggctggaggaagacaacgaagttctgttctatggcaataaaattacggggaaaaatcgagagttgaacgagtttatagacaagaatcggcacctggaccctcgtgctctcaattttttggcgtcttacttcttggagatgaagaaacgtgggctcaaatgcatcttctcatctagccacttaagccatttcctcaagatctccacaaagaagctgaactggctggcctccgacaaagaagaccactatataagtttcagcgagaaaaagcgaggcggagggataagacagattttcgcgcccaaatcaaccctcaagggcatccagcgccagatcctagattttttactacagtccgtgccactcaattcgcacgctgagggcttccgcaagaagaggagtattgtaacaaatgccaaacggcacattggtaagaaggtggtgatcaagatcgatgctaaaaacttcttcccatcgattacttttgagagggtcctgggaatgttcgtctcacttggataccctcggaaggtttccttaatgctcgcaaaactgacgacccatcaaggaagacttcccacaggtgcccctactagcccagccatctctaacttgatctcccggcggctcgataagaggcttgctggccttggtgaaaaaatgggctttgattacagcagatatgccgatgacatgactatcagtagcaacaacaaaaacgcctccaggatgattcccttctttaaagagattatcagagaagagggctttgagtctaacgaagcaaagctgagaattctccgcagtggaggccgccagaaaattaccggcatcgtggtaaatcaaaaagtcaacgtggatagaaaacagatcaagaaacttagggctactatctacaattgtcgacataaggacattaagcaggaaatgataaagtgggcaaagaaggagaagaatctgaagaatccctatgggtacacacttaaggaatttcgtgccagcttgctcgggaagataaattttgtgaaatctgtgaacgcaaaggccgggaaaaagctgctgaaacagctagacgaactgtcactgaaaacctga

SEQ ID NO: 13932 - RNA, 1209 nt, synthetic construct
  source 1..1209: mol_type = other RNA
atggacaagaagaagtcatgtggcaataagaaacagtacctgaagaaccttagactcattaaccaacgcgcaaatgtcgacccagagataattgacctgattgaggcctatgcgagactgaggctggattacgacaaagagatttgcttctactccaataaaacctcttctgacaagctggaattgaacaaaatgctcgcaaaaaaccggcatctggatccaaggtgtcttttttttctcaaggcctacttcattgcgatgaagaataagggcttgacatgcttaatcaactccgcacacctcgcccacctcctcaacgtatcaatcgaccatttaatatggttaagcaacgataagtcgaaccagtacacccgatttcacatcaaaaaaagcagcggtgctaaacgtgaaattctggctcccaagcctaagcttaagattgtgcagcgacaaattctggacaatatcctgcagaaaatccagcttaacagccacgcagagggcttcagaaaaaaaaggtctatcctaaccaatgccaaacgccacattggaaagaaagtggttattaagatggacgtgaagaacttcttcccctcaattacttttaaacgggttctgggactctttatcgctcttggatatccgcatcaggtgtctatgaccctgacgaaactgatgactcatgatgggaaattgccaacaggggcccctacttcccctgccataagcaatattctaagtacgaaactcgacaagcgcttcgctaatctgggcgagaaaacagattttgactactcaagatatgcagatgatatctccataagtagcaacaaccgtaatatcacccggatgatccccttcttcaaaaaaatcgtgcaggaggagggtttcgagataaatgaagccaagatgagaatacttaggaatggaggccggcagaagatcgctggtatcgtcgtgaatcagaagttgaacattgaaaagagggaaatcaaaaagatccgggcggtactgtttaattgccgcaacaaggatatcaatcaagaaatcaagaagtgggctcagaaggaaaaaggcctaaaggccagtctgttctatactatagatgagtttaagtcctccatgttggggaagattaactttatcaagatggtcaacccccagacagggcaaaatttgctggaccagctgaacgatctcaatgcctga

SEQ ID NO: 13933 - RNA, 1224 nt, synthetic construct
  source 1..1224: mol_type = other RNA
atggctctttgtaccaaacaggaaacctacctaaataacctaaagacgataaacactcaggctggggtagagccagatttggttgacataatcgtggcatatgctaggctgcggctcgagcgcaaccttgccattactttctatcaggagggtatcgagaagaaaaccacaaagtaccccagcctgaggactatcattgacaagaaccaagaagctgaccccagagcgttgaacttccttgccgcctattacctggagatggaccgacgcaatctgctgtgtatattcaaccgtcagcacctggccgtcacacttggcgtgagcatttctaacctggaaaagcaggcttctaccgcttcctcaaaatacagccactttttcgcaccgaagaagtcgggcggacagcgtgagatccttgctcctcacccggaattaaaagcccttcagaggaaaattttagacagtctcctggacaaggtaccactgaatgcgcatgcagaagggttcagaagaaagcgctccattgtcactaatgctcagaggcatccagacaaaaagattgtgataaagatcgacatcaaggacttttttccttcaacaaccgcaaaccgcgtgttcggaatgttcgccgccctggggtaccccaaaaatatcgcagccatcctcaccgacctgacaacgtaccagggtagactcgcgacaggagcccccacttctccagcaatcagcaatatactctgccgacggttggataaaagattcgctcggttgggacaagcgaacgattttagttacagtcgttatgcagatgatctgacaatctcttccaatcatcctaaagtgaccacaatgattccattttttaggcagatcgttagtgaggaaggttataccgttaatgagaagaagttgcggattatgagatccggctcacggcaacaggtcactggcatcgtagtcaatcagaaactgaatattcctaggcacgaaatccgcaaactgcgagcagtgattcacaactgcaagcaaaagagcctgaaagtggagatccataagtgggccaagctagagaaaaaccaccctaatcccaccctctatactgaagatgatttcgagaaaagcctctccgccaaaattcattttgtgaagatggtgaacccctcagccgggacgaagctgctcgtggattttaagtctctgggcttacggaccgtcgttgcctga

SEQ ID NO: 13934 - RNA, 1215 nt, synthetic construct
  source 1..1215: mol_type = other RNA
atggctctgtgtagggagaaagaacagtatctgaagaacctgagactagtcaatttgagagctgacgttgacccagagttagtagatcttctggtggcatatgccggaatgaggctggagaacaacagagatgtgaatttcttccaggacgatgttaaggagcgggcagggaagcacccttacttgctccggttcctccagaaaaacaaggaaactgacccccgcgcccttaattttctcgtgagttatttcctcgagttgaagacgagaggaatcccctgcgtgttcaatcgacaacacttagcagatacattgggcataagcttagtcgccatggacgaactcgcacaaaactcaccaaaatactacacccggtttagcgctgctaagaagaacggggctcagagggagatcctggcgccaaaagccgaattgaagacagtgcagcgtaagatccttgatttccttctcatcaaggtgcccctgaataaccatgccgagggctttcgaaagaacaggtccatagtaaccaatgcacagcgccacaccgacaagaaagtcctaattaagatggacattaaggatttcttcccgagtacaaaagctaaacgcgtcttcggcatgttctttagcctgggctatcccgaaggtgtggcctccaccttaaccaatctgactactttcaaagggagactggccacaggcgctcctacgtctcctgctatttcgaatgtgctgtgtaggcgcctggataaacggtttgcacgtctgggagagaagtgcgatttttcctacagtcgctacgccgacgatctgaccgtctcctccaataatactaatctggccgggctgctgcctctgtttaaagagattgtgctcgaggagggttatgaattgaacgaaaataagctacggatcatgcggtcagggtctagacagaaggtcacaggagtggtagttaacatcaagccaaacatagacaagaacgaaattcgcaaactccgtgccgttgtctataattgccgacataaagacatcaacaaggagatttacaagtgggcccaaatggaaaaatctcatcctgagccgtcacagtacactctggacacctttaagaggagcgtgagcgcgaaaatcaactttgtgaaaatggttaaccacaaagcaggcgaaaagcttctcgcggattttaaagccctttcttggcccggttga

SEQ ID NO: 13935 - RNA, 1317 nt, synthetic construct
  source 1..1317: mol_type = other RNA
atgcccaacctggcttctcatgtgccagtgcttagccaggttcgcgacaattcaataaaatgccctggcatcatcttcttccctaagaataaccttaagattatgacggagtgtaccgaacattccattttcctcagaaatctagtggaggtcaatcaaagggctggagtcgatagcgaggtcctggatctaatcgagtcctacgcaaggctgcgccttggccggaacagagaagtggacttttacaactgctcgaggcccgtctccgaaaaggatcaggatttaagagcgtttttggagaaaaacaagaacctggacgaaaggacgcggaacttccttgtcgcttactaccaggagctgaaagaccgccacctctgttgcatcttttcaagtgatcatctagcacacttactccagacctctcttcctcggctgcacgccttgacacgagactctcggaactaccacgtcttcaccatcaagaaaagttcaggggcagatcgcatcattcaggcaccacataagcagctgaagactgtgcaacggaagatcctgtccaccattttacacccagtgcctttgaataagtacgccgagggctttcgaaaaaaaagaagcatcctgactaacgccacacaccatgtgaacaaaaaggtgatcgtaaagctcgacattaaggatttcttcccctcaattgacagcaatagagtttttgggatgtatctgcatttgggatacccgaggcgagtagctcaactgctgaccgatttgtctaccgtccagaagaagctgcccaccggggcacctacaagtccaactattgccaatataatatcccgtcggctggacaaacggttcgttaggctcggaatgaaaacagacttcacttatagccgttatgctgacgatattaccataagcagtgacactgacaacatcctcaagatgataccgttttttaaggagatcattcacgacgagggctttactgtgaatgaagggaagatacgcatcctccgatctggttccaggcagagtgtaacaggtgtggtggttaatgaaaagccaaacatcaaacgccgcgaaatcaagaagctgagagccgtgttgcataatagcaaacggggatctctgcacaaacaagcggccatttgggccatgagagaaaaaggcctgaaaaattatcgttcctattcagtggtggatttctatcagagcctgcttgccaagatccacttcgtaagaatgattaatgagaaagccggtaacacgctcctcgctgatttttacaggatcccctggcccgttattacatga

SEQ ID NO: 13936 - RNA, 960 nt, synthetic construct
  source 1..960: mol_type = other RNA
atggaaatgaaaaacgctggactgacatgtttatttacttgtagccacctgagccatattctcgacgttccgctcaaaagattgcggttccttgcaagggataacggcagctattacaagttcagcatacccaaagcgaatgggacaaagagagtgattatggccccaaagcccgacctgaaggtcgtacagagaaagataaaccatttgatactgcagaaagtgaggctcaataaccgggccgagggctttcgcaagaagcgctccattgtgaccaattccctgcaccatttgcagaagaaggtggtcgtgaaaatggacattcgggattttttcccctcgatcgactttgagagggtattcggggtgttctgctcattaggctaccctcgcggagtgtcactgcttctaaccgatctgtctacttgccagagagttctgcctaccggagctccaacgtctcctgctattagtaacatcatttgtaggaagcttgacaagcggctcgtcctgctatgcgagaaaagtggtttcgaatattcccgatatgccgacgatatcacagtgtcaggcaattccgagcaagtcgttaaaatgattcctctttacaggcgaatcatcgtggatgagggcttcaaagtaaatgaggaaaagctgagaatcacacgctctgggcggcgtcaaaaagttaccgggatcatcgtcaataggaagatgaatatcgaccggagagaaatacgcaagctccgtgcagtcctgaataactgcaggcatggtagtatcgaagagcaggccgatatgtgggcatctcgagaaaagaagtgtactgctccatttaactaccccgtggagaaattcaaaaaaagcttgcacgcccgcatttcctttgttaagatggtgaacccacagatgggtcacagactcctggacgagttccacagcgtgttttcagccggatga

SEQ ID NO: 13937 - RNA, 1215 nt, synthetic construct
  source 1..1215: mol_type = other RNA
atggctcggtgggacgaggataaagaagcattcatccgcaatctcatccaggtgaatttaagagccggggtcgagcctgagctggtggatctgctggctgcctacgctcgcattcgtctgcaacagggagacaaagtcaccttctactcagaggacgccgacctgcctggctctaggaggaaagctgtgagggctttactggaagctaacagacaccttgacccccgtgccttaagctttctgagtacatacgcagaggccatggtccagcgaggtctgattcccattctgacccgaacgcaccttgcaaaactcctcgaggtgagtgagaatgaattatccgacctagccacttgtactgataggtattacgatgtttttagcatccctaaggctaacgggcagagaagaaagattcaagccccgcggcccccccttaaggaaattcagcagcgcatagccgctctgttggagagggtgaaattgcatccagacgcacatggcttccgcggagagagatcaatcctgactaacgcaaggctccacctcgacaggcaggtggtgatcaatttggacgtgaaggactttttcccgtctatcaccttcgagcgcgtacttgggtgccttggctctctcggatatccccatggcgtggccctgttgctgacccagctgaccacgtatcatgatgttattccaacaggtgcgcctacttccccaatactttccaacctgatctgtcgacggctggatctgcgtctcagccggctcggagatcagctgaacttcaggtattcgcggtacgcggatgacatgaccatttcttcagaggatggcggaattgtaaggcgattgccctttttcaaggagattatacgcgaagaagggttcgaagttcacgaggaaaagatcagagttatgcggaaggggtccagacagcaggtcacaggcgtaatcgttaacgaaaagccaaacctccctcgacaagagttgaagaaactacgggcggtgatacacaattgcctaactgccgacctcgaaacacagagaatccggtgggccctgacagaaaaaggtttgcaagatcctgacggttttgcaatggaggcctttcgtcggagcctttgcgggagggtcagtctggcgagaatggtcaatccaagagcaggcgtgcaactgctcgatatgctaaagcgcgtggagtggcgcatctga

SEQ ID NO: 13938 - RNA, 1176 nt, synthetic construct
  source 1..1176: mol_type = other RNA
atggagtgttcccatgaagagttcgtgtcgaacttggtggagattaatcaaagggccggaaccgctcctgaactgattgatctgctgggagcttatactcgcctgtgtctcaaacggagtaaggagattgaattctatagtgacagcttgactctgtctaccaataaagccgccattcgaaagttcatctcacagaaccggcacatcgaccctcgctcactttccttcctggtttcatatgccgaaatgatgctagacagaaacttaccatttatcttcaacatcgcacaccttgccaggtttcttgacctagataaggagaatcttttaaggctgatccagaacaaagagtcctactaccattctttttacattccaaaaagccacggcggtaagagacatatttgcgccccaaaagccgagttgaaagcgattcagaaaggaatcctgacagaaattctcgaaaaagtcttcgtacacccgtgcgcgaatggatttagaaggggcagatcgatagtgagtaatgcacaaaaccatgtcggccaggagatcatcattaagatggacatcaaggactttttcccctccataacatttgctcgggttaagggtgtctacctggatctcgggtaccccgaagggacagctgaggccctgacagaactcagcacctataagggccgactgcccatgggagcacctacctccccctatcttagcaacatagtgtccagtcgtatggacagaagattcgccgggctggcccagaaaatggattttcactactctcggtacgctgacgatctggctttcagctctaatgatcctacgtttaatcgctggataccattctttaggcacatcatcgaggacgaaggattcgaggtgaacgaaaagaaggtcgcaattgctcggaagggcgggcgtcagaagctcactggcgtggtggttaatagaaaaataaatacccagcgagacgagtataagaggctccgggcagtcatccataactgcttgaacggggatattcaagagcagatgaagcgatggggtgtatctgaattagatcgctttaaaaactcactgcgcgggcgtatcagcttcgtgaggatggtgaaccgcgagaagggcaataaattgctctctggctttgagcggatcagctggccggcatga

SEQ ID NO: 13939 - RNA, 1176 nt, synthetic construct
  source 1..1176: mol_type = other RNA
atgaagtgctccgatgagcaatttataagcaacttgatcgaactcaatgaaaaagctaaggtggctcccgatctgatcgatattattaccgcctacgcacggctgtgccaaaggtacggcaaagaggtcaaattttatgacaagaatcccgctatttctacaaacaagcctacaatcaaggactttatagacaaaaaccctcacctcgacaagcgaagcctgtcattcctggtgagttatgccgaaatgatgagaaagcgcggactgccattcatattcaatatcacccacctggcaaatttcctcgaggtagaggatgtcagactgaaacagttgatcaaatacaaggagaagtcttatcacaacttttatatccccaagagcaatggcggaaaacggttaatttctgcaccgactgaccatttgaagaccattcagagaaaaatcctcaaagacatcctagagcgggtttcacttcacccctccgcaaatggtttccggattggacgcagtgtaacaactaacgcggaaaaacatactggccaggaggtggtgatcaagatcgatattaaagatttcttcccgagtatcacgaaccagcgcattaaaggcatttacgttaaccttgggtatccagatggagtggccgaaaccctgacagggctgagcacttataagggtaggttgcctatgggggcaccaaccagtccttatcttgccaatatagtcgctacccgattagatcgccggttcgctaacctgtcgaagaagattgacttcgtctactcaagatacgccgacgaccttgccttctctagcaaggataagacatttgctcgctccatccccttttttaagaaaattatccaggatgaggggttcgaagtcaatgaggaaaaggtggttatagcccgtaaaggaggccagcagaaagttactggcgtggtggtgaatcgaaaggtgaacattgagcagaaagagtacaagaggctcagagcggttgtgcataactgtgtaaacggagacttaagggaggagatgaaaaaatggggggcctcctccctaaatgaatttaagtcaacgttcctgggtcacatcaactttgtgaagatgctgaataacgaaaagggttaccgtctcctggacggctttaggcaaatcagctggccagtctga

SEQ ID NO: 13940 - RNA, 1131 nt, synthetic construct
  source 1..1131: mol_type = other RNA
atggctaactgccccgacgaacgattcataagtaatcttatcgagctcaacaagagagctgatgtcgatccagaaattattgacctagtcgccgcatacgcacgcctctgtctgaaggatggcaaggagctgaacttttacaaggagtatctggccctctccaccaataaacctactatccagagattcattgagaaaaatgcctcacttgacaagcggagtttgtcatttcttgtctcttacgctgagatgatgaggaaaaagcggcttcccttcctgtttaatcgagcgcacttagcaatattcctgggcactaaagagggagagatcgaagccattatccaaaataaggaaagctactatcacactttcttcatccccaaaaggaacggggatgagcggcgtattacagcgcctaaggaccgcctgaaagagatccagaaaacgatcctgcggaagattctcgagaaagtgtccgtgcatttcgcagctcgcggtttcaagcggagaagtagcataatctccaacgcacacggacacattggccaggaaatcctagtgaagatggacatcaaagatttctttccaagcatcacctacgaaagggtcaagggcatatttatcaacttagggtaccccgaaggtgttgccgaggcactgaccgaactgaccacctacaaaggccggctgccaatgggagcctcgactagcccttatctgtctaatattattgctatccgcatggacaagcgctttacaggcttggcgaagaaaatggactttacatactctaggtatgccgacgatctagccttttcatctaaggatggaaacctcaagaggcatataccgttctttaaggagattattaaggacgaagggttcgaggttaacgaacagaaagtggtgatcgccaggaagggtgggcagcaaaaagtgaccggtgtagtggtaaatagaaaagtcaacgtggagaagagagaatataaaagactccgagctgtgatccataactgcaaaaaaggcaacttgaagacggaaatggctaagtggggggcctccaatcctggagagtatgagttgccacgtagcaaactgacaggatatcagaagaatgttaattgttgctga

SEQ ID NO: 13941 - RNA, 2643 nt, synthetic construct
  source 1..2643: mol_type = other RNA
atgaaaaaggagaagcaagctactcgaacactgtccaatcccattcaaaacgacgtgctaaaaaataggctccagagcatctttcggtcctttaggaaagccgaccggacagatattaaatccgtggaggacgctctggaccggctccaattcctggccttccctgagttctaccaggcctgtttgttcctactttgcatcgagtgcgaaagatgtgtagaggccaatgtgccaccgagcgtcattcgggccgaacgcattgtgcaggctgttgaagcgaaggccgccgcaggtatgcagggaaggctagcctattggattaaccagaagctgactaccagttatcccctcggattagtgcagcgcctcacggcctattcacataagattaacgagtcacgaaacacccagtgcattaccctcgtggatgcaggtagacatgaggaagccctcgccgtggctgaatctattgaggatacagaacaacagtccaaggcattgtgtgcgatcgccgccgactttgcaaggttgagccagaaggaaacagctgaccccctgttcaaaagggctctggacctgatcgaaattttctatgcctacacatttgaagatgcagatgaatcaggatatgggggcgactacgatgagtacctgcaggtgaagggtaaatgtacccggtatatggtgggaaagatggctgaaataggctggtttaaacgggcagaagagctaagcaataatatcgaggacgagtggctccgaagtgaggctttttgtaatatagcaaaagatctcgctgcaagcgggcatttatccgagtcctttgaggcggcagcaagatcaggaccccaccagtctatcgctctggggtgcatcgctgaaactattgctaaaagcggcaacttcttccaggccttgaacgttttctctaaagccaatgacttggcagcagagcagcaaggcctttggaaatcaaaatgcctgttatctgtcgctgctggcttggttattatcgggacgaaaaataaggctcgcaaagtggcggagcaggccagtgaagttatcatcgacagcatcaagttctacgaagacgacgtaaaccagccagcagatatgagaatacggttcgtcatggacctcatggaggtcgggggctttgaaactggtattaaggtccagatcgagcccatacatgaaacacttgatcttctagcacagtataagtcgtggttccgcgtcctggatcggatcttctcttcaggaagtattgacgccctgttgtttaagtgctacctgaacggctttgccagttccgccgtgtttggcaataatcgcgctctcatgatgaggctgattcgtgaggcatgtcacatggtgagtagcgacgagaaacctgaggtgtttcttgctctaagtaacgaactcgccctgctgggcatcaatgatatgcgcgatgatgctattgtgcgagctatcgtggcgggatccgatcacttgcgtatgcagcgggaagagtacatcaagaaccctacgccttcactccccgataatcaaccacacgctgaggagccgcttatacctgaggaatggccacaggaaaacacccggatatcgaacatcctcggtatctctgttgagatgctgcgcctggtgagactgaaagtgattcgcgctcaaggctacgacgcgtttaggatcccaaagcgaagaaagggctttagggtgatccacagccctcactctgatttagcgcacattcagcgtcgaatcaaagaatgcatccttgatccagcccctgggctgccaagctgtgtcacagctttcagaccaggagtatctataagggataacgccatggtacattgtgacaaagcggtggtggtaaaatttgacctcgaagacttcttccccagcatttctttcacccgcgtcatgggcatctttcactccctgggattccccacgaatgaggctaggatgttggctaatctgacaaccgtgcaccttgacgtgtccagttctggcccggttgtcaagtctgtatccaggagtgccgaggcattttatcagactaagcatctcgtcgacttgctgcatgagtaccccgtcaacatacgtttactggcataccgctggaactacgggaagatctctagagcactggccttaaggatgttaagaaagagaagacggaggggtcttccacaaggggcctcgacctcacctcagcttgccaacctggccgccgttaggttggatctccgccttcgtgcccttggggagtccatgggattcgcctatactcgatacgcagacgatctgactttttcaagcaatgaacggctcgccaaggtggatgcgctgacaagcctggtcgacgagattgttgtggactgcggattcagactgaatggccgtaaaaccaagataatgcgggccccggccaccagaagagttactgggctgattgtcaacaccacaacccctaaggtacccagatccatgctgaggaaggtgcgggcaatgctgcatcaacaggccggtggcaagctgagcgaggcggatatccaccgcttgcgcgggtatctgagcttcgttcgaatgatcgacaaggagcaggccgatctcctgctggactgctga

SEQ ID NO: 13942 - RNA, 1155 nt, synthetic construct
  source 1..1155: mol_type = other RNA
atgccagctaatcgagcccttgggctgcccgccatcgaacatcgtcgaggcaacactcccaagaggggcatcgcacccactactcagcaggagtccagatggcggagtgggtcctctattcggataaggtggacgggagatgctcgggttcgtagcggcgatggcttcgtcgagccactcgatttccgatcactggactctgcagacgatgtagccaggatgacgggccttgatatcgaagaaatccgtgcaatcgcttggagaacagaggctccgcgaggtggctggtacaggaggaccctgattccgaaacggcaggggggcttccggttgattagcacccccattcctagattggctgcggcacagaggcgcatcttagctgcgattggcccccatttccctgtgcacccagcagctactgccttcagactgggtatgtcagtgcgggtaaatgctgcctgtcacaccggccgccctatcgtcgtgcgcatagacctagcggacttcttcagtgcagttagatttggacagatccaccgcgccttcgaatgtgccggatgcacacacgaggccgcaagaattcttgcgtctctgacatccgacgtagctgccaccgttcgcccaaggggtcaccgtacccttgtggttgctggtcgcggtggattaccgcaaggcgcgtgtactagcccagtcctcgccaacgccatttgctgggatctggatgaagacgcccggaccttgggacggagactagggtttacctatacgcgctacgccgacgatctggtgtttagcgcaggcaatagtcgcgcaccagtggatacactcatccgggaaacacggagaataatccaggcctatgggtttcacgtgaacgaagccaagaccagggtcatgagggcaggcgggaggcaagtggtgactggactcgtcgtcaatgggtcagagcccagagtgcctaggcctgacttgagacgctttcgcgcctttctgcatcactgcgagacagaggggctggacgtgatgtccgagcgaataggaaaagacgctctcaactacgctcgaggatatctggcatgggttcacatggtgtcgcccgagcaggccgctagatttagggcccggcatccttggctgggtggacatgggtga

SEQ ID NO: 13943 - RNA, 933 nt, synthetic construct
  source 1..933: mol_type = other RNA
atgaacgctgcggaggattccctggacctccaggatatctcatcctttctaggattcgctccccagcatattttctatctggtagaggacccggataaattctacaccactatcagaataccaaagaacagtgatccactcacctatcgcacacttgatatcccctacagtgagctcaaaggagtccagagagttataaacaggaagattctgcagaagttgcccttaaatgactgtgccttttcatatgtttcaggcaaatcgatttacgcagctgcccacgagttttgcggtggcaaggccgtgctgaagatggacattgcagatttcttccctagcatcaccggccagagggtgttgggactgtttaagtctcttgggtttaaccagagtatctcttacattttgtcccaactctgcttgcgcaacaattgtattgcccagggcgctccaacttctcccgcagtgagcaatttaatcatgcgccggtttgaccgacagatggagaaactcgccgccagttgggaaatgtcttatctgagatattccgacgacgtcttcctgtacaagaacaagaacttcaatcaccctaagcttgctttttatgtcacaaggatcatagaacagaatgggttcgcagtgaatcagagcaaaacacgtttccaccctcgagggcaacctcgtattactctgggccttctaacacatggagataagccgtccataccaggtcccgccaggaggcaatatcgggcagccttccaccgggcgagcagagattttgaatgggcttaccataacgaagcccggctgaaagggattctggagtggtacaaatcagtgcatggtaaagacgacgcgtacaaccactactcctctatccacaagaatatcaataccctgaaaatccatacgagctaccgcagccaatga

SEQ ID NO: 13944 - RNA, 933 nt, synthetic construct
  source 1..933: mol_type = other RNA
atgaatgccgcagaagatagccttaatctaagagatatcagcagttttttgggattcgctccacaacacattttctacttagtggagaacccggacaaattctataccacgattcgcatcccgaaaaattccaagccacacagcttccggactctggacattccctatacagagctaaaaggagtgcagcgcgccatgaaccgtaagattctgcagaaacagcccctttcggaatgtgcttattcttacgtgagtggcaagtcaatcttctccgcggccagagagttctgcgggggtaaagcgatcttgaagatggacatccaagacttttttccaagcataactggtccccgagttgtgggcttgtataagtcactcggttttaccgattccgtggcttacattctgtcccagctgtctctccggaataacagcatagcacagggcgccccaacaagccctgcaatcagtaatctcattatgaggcgctttgatcgccatatggagaacctggccacctcttgggaaatggactacctgcggtactctgacgacatcttcttctataaggataggaactttaaccaccctaagctcgaggagcttgcaacccagatcatcgaacacagcgggttcacagttaatgtcgctaaaacgcgataccatcccaggggcgtaccccggattacattagggctcctgactcacggggaccgacctagaatccctggacctgctcgcaagcagtatagggccgctttttatagagcctctagggactttgagtgggcctacgccaacaagtcaagactgaaaggaatactggaatggtacaaatccatacatggcaaggatgatgtcttcaatcagtacagtgcaatttaccgtaacatcaataccctgaagattcatacttcatatcggtcccaatga

SEQ ID NO: 13945 - RNA, 975 nt, synthetic construct
  source 1..975: mol_type = other RNA
atgaggtttattgcgtggcatcgcgaacgggaggaggtgggaatgggtgccgccgatgattgccaggatctcgccagcatcgccgattatctcggctttgcacctcagcatatcttctatttggtcgaggatcccgaccggtgctacgtgtctatagaaatacctaaaaacagtgacccgaccaagctgcgcaagctcgatatccccatttctgaacttaagggcgttcagcgggccattaataaaaagatcttgtcagaattccccgtggatgaatgcgtacactcatatgtgccagccagatccattctgaccgccgctcgggaattctgtcctggtcgtgcagtgctgaaaatggacattgaggacttttttccgtctatcacatttgtacgagtccttgggttgttcaaggctctagatttttctgacagcgctagctttatcctagctcgcctcactaccttcgccgacagactggctcaaggcgcaccaacttcacctgctctgtcgaacctgatcatgcggggcattgatttcagactgaagagactggctgcaacgtgggaggttaaatacttacgctactccgacgacatcttcttccacaaggagaaaaatttcaaccacccaaaattgactgcgtacctcagtaaagtgatagaggacggtggatttacggccaacaacaaaaaaaccaagtaccaccccaaggggcttcctaggacaactctgggactccttacacacggggagaagcccaagattccaggaagccagaggaggatctaccgttccatgttctttaaggcaagtaggaatatccactgggcacatgagaatagagaaaagttacgagggataattgaatggtataaatgtgtctacggcagagacgacacctatacacaatatcgagccattctggacaatgaggccaggctgcgcatccatgatacctaccagtccaagtga

SEQ ID NO: 13946 - RNA, 933 nt, synthetic construct
  source 1..933: mol_type = other RNA
atggacgccgcagcactatgcctggatctcgaaaccctgagcggctttctcgggtttgcgcctcagcatatttactatttggttgagagcccagagtcatattacacaacgataagcatcccaaaaaaatcagaccctatgaaggtccggcagatcgacattcccttttctgaactcaagggggtgcagagagccatcaataagaagatactgtccgagcttccgatgtcggataacgtgcatagttatgtgcagggccgcagtatcttaaccgccacgaaattgctgtgtcctggtcgtgccattctgaaagtcgacatcgcagattttttccccacaattacctaccgtagggtattcggactgttccggcgccttggctataatgatgctgctgccttcatactgtcaaggctatgcactaaggacgataaactctcccagggagctcctacctccccggcaatctctaacgccataatggccggtcttgataagcgaatggagcgattggctgagacttgggagctgaagtacctccgatacagcgacgacatgtttttccacaaggaacggaatttcaaccatacacgcctggctgacgtcgcgtccagtgtggttgagtcctctggctttatcattaacagcagcaagactaaataccaccctaagggattgccccggatcacacttgggctgctgacccacggaccagaacccaggattcccggtccacaaaggaaaaagtatcgcgctgccttctttcgcgcctctagaaatattaattgggcatacgaaaggcaagcccagttaaaagggatgctcgaatggtataaatgtgtgcaaggccggagtgacgagtacatccagtatcaggcgattttcgagaacatcgaaagactgaagatccacgattcttacagatcaagatga

SEQ ID NO: 13947 - RNA, 921 nt, synthetic construct
  source 1..921: mol_type = other RNA
atgattgctgcacagattcaaaccctggaagatctgtcaggagccctgggattcgcgcctcagcatttgttttggcttgccgggaacagcgatgccctgtacaaggagttcgacattcccaagcgcacaggcggagtgaggcggatcagtacccccatagccgagttaaagggagttcagagaaccatactccagagggtgctccagctgcatgctgtgtccgatgccaattttgcctacgttaaaggcaagtctgccgtcgctgcagccagaaggcttgctggggagaaatccttgtttaaattagacatccgggagtttttccccaccatcacagctcgccgagtgttcggcctgtacagatcttttggtttccctaaccctactgcatacctgctcacttctttaaccacgtatcgcgggtccctttgtcaaggcactccaacctcaccgtatattgccaatctaatctgccgaggcatggatacacagctgagtggtctggccagttcctggggtctggaatatatccggtactctgacgacctcttcttttacagaaaccgtatcttcaattggagcaagtttgagggagtcgtcactcggatcgtggtacagaacggcttccacctaaatgccaacaagagccgcttctacagggcagggaaagatagactcactctgggcctggaaaccgggcaaaggcagattcggcttcccagggcaacaagacgcctccatcgtgcggcgtttcacaaggcctccatgtcacctcggtgggctgctgacaatctcccacaattgaacggcatgctgagctggcatcgagcagtgcacggaaaagatgacacagcgagcgcatatgggcgtgtattgcagatagctacatcgattaaacaccacgacccatattcaacgtga

SEQ ID NO: 13948 - RNA, 927 nt, synthetic construct
  source 1..927: mol_type = other RNA
atgacaactgcggccctctcactcgagttgcgggagctgtccagtgagttagggtttgccccacagcatgtattttaccttgttaagtgtgccgacgaactctacttcgacatcgaaattccaaagaggacacctggcgagtttcgaaaaatttcggtgccaagaacggaactcaagggcgtccagagggctattctgaggaagatattgtctagccacgagccatctgaatttgcccacagctacataaagggaaagagtgttatctcagccgctaagaagcttttgggagaaaaagccgtgcttaaagtcgacctgaaaaacttctttccggcaatctccgctcgtcgcgtattcggactgttcagagccttaggatttagcaacaaaaaggcgttcatcctgaccaaactcaccacttataaagggacactttgccaaggtgcccccaccagccccgcaatctctaacttggtgtgtagatccctcgacaagaacattaatgcactggctatctcctggaagctgaattatctacgctattgcgacgatatctacctgtaccatcggatcaatttcaattcagataagcttctgacgcgcctgcggcgaaccgtgaatgatcacgggttctcactgaacgaagataagacccggtattatgcagctggtaaccctagaattactctggggttatctacacatggccgtgtgctaaggctcccccgagctatgaggcgggagcatagagcggcctttcacaaggcctccactagtcctacatgggctgaggcaaatctgagcaaattgcgcggcatggccgagtggcacaaagcagtgtatggcagcgatgctacctacaaacactaccgcgaaattataaaaaacgtccctctgatgaaggttcatgagcccttcgcaatttga

SEQ ID NO: 13949 - RNA, 909 nt, synthetic construct
  source 1..909: mol_type = other RNA
atgattagttccgtcgacgacttcgctagccgaatcggcctgtctgaattctgtctcaagcgcctgattttaagatcggagtccttctacagtagcttctcactgccgggcaggtctggtagacgccataacatcagcagccccgcgacggaacttaagacagtgcagagatggatcctgaaaaacgtcctttcaaggttcgagttgcacgaagcatgcgttgagggacgcagtcgcagcaccccaaacgccgacagcttcgtgttaaaggcgtctctgaaatcgttcttcgcaactctcaaccgggcacgggtggaggggttgttccgttccctcctgtttcctgagtctgttgctgtgagccttgcccgcctcaccacgtttcttaatgcactgccccaaggtgcccctaccagtgtgtatatcgccaatctgatatgtagacgcctcgatcgccgagtgaatggactgtgtggagttaggaattggtcttaccgacgtgattgtggggatattgtcatttgcggccagggtagagtcactgacaaagtgttggagcagctgacacagatcgccagggaagaagggtttgacatagaaattcacaaacggaccagctgcaacggagctacagacggtgattccaagaccggcccagtgactggccgcgtatcctcacagggggctgatctgtcctttaggagattgcggaggactaagtctcaacggagaatcgtgggccggcctgcccgaaaacagtcaagagctcggtcctcatttgcatcacgtctacccgagctctgcggactagatagatcctttacagggagtgccaggcagaagagggtacgggccgagttaaggctgctgtttaattctgctgtcggcaatagtagcaacacccgatga

SEQ ID NO: 13950 - RNA, 972 nt, synthetic construct
  source 1..972: mol_type = other RNA
atgtccatcagattcggcattgctgagcgcttggtgctgctgcttgtcatcaagatgattgagacttcaagaagcataaagatggacaaccttcttgagacactggaaatctctgaactggagctcaagcgttacgcactccgtgccgagaagaactatcacgaactacataggctgaagaaatccggaaagacacgaagagtggttgccccaagcgcagaactgaagggcctccagcggaaaatttcaaggcgaatactccggcatcacgatctgcaggacagttgtacggggtataggccaggccactctattgtcaccaatgcccgcccccataccgggaaaaggtttgtactgaacatcgacttgaaagactttttccccagcatcagcttcaatagggtggtgggattataccagaacttgggtatggaccgcaatgctgctcggctgttggctagagcaaccacatataaaggtgcccttccgcagggcgctcctacttcccctgatattgccaacctggtgtgtaggacactcgataagagactggaagggttctgcaaaatccgccagtggtcttacactaggtactgtgatgatatcaccatctctggtgacacttgcacagatggggccatggataccctccggaccattatagagagcgaaggattccgcattaacgaagacaagacacggatgcgcatgagtcatcagagacagaccgtgacgggcgtcgttgacaatgagcggcctaacttagagatcagcgagcgaagaaagctgcgtactatatgccaccaacttagatggaatcccgagtcctttgaggggctcggaaagaagctgatgggctcattatcatttgcgaatatgatcggcggattgctacggaaaagtgagtttcaatccgcgtggaggctgctgaaaaaaaagcaccacgaagcccgacatgcatcgactacctga

SEQ ID NO: 13951 - RNA, 1101 nt, synthetic construct
  source 1..1101: mol_type = other RNA
atgtttaggcagccggacgtggtcggcaatttccagctcacgattaagctattagggcttggcagcaactctgtgatgcatgaaagcagcaacgctggaaacgaacggctagaaaggatactgccttcgggcgtgaaggagagctttccagtattctacttctgcgaatttgtgcaccgaagagaggctggagtgctcccagtcccctacatgtacgacatccagacagtcgcgcagctggcaaacgctctggattcctcagagttcgagctgctgaggttcatttaccgggctgaagagttttacacccgcttcagaaagaaaaaaagtactggcgatatgcgtactgtggccgcccctcgcaagcccttgaaggctgtccagaaggcaatcgttaagaagtttttggccgatattcccctccctgatgagtgtactggtttccggccaggaatgagcatcttgtccaatgcccagccccattgtaagaaacgtttcgtctttaataccgacttagaggatttcttcgggtctatctcctcagaaagggttctgggcctgtatttacgcctcggctttagctttcccgtagcctgtgtgctgaccgaactcacgacctatattgggtgcttgcctcaaggagccccctcatctccatatcttgcgaatctgattgcatacagtatggacgccgacttggctgacttttgcgccgcaaatgaatggtcctatacaagatattgcgacgacatcacaatatctgggaacgggaatttcagtctcgccgatatgagaactattagcgatatcgtggaggtggagggttttaggatgaacatcaaaaaaacccgattccacaagcacaactctaagcagatggtgagtggtctggttgtgaacgaaaaaccgtccctgccacgcgccaaaagacgaaaaatccgggcaatttttcatcaagctgaggttgagcctgaacggtacggaaatcgcgtgaaagagctggaaaaccacctttcaatactttctatgctggaccctcagtccaaggaggtcgagaagtataggacagtactcaatcggctgatctcgcaagcaaaatga

SEQ ID NO: 13952 - RNA, 918 nt, synthetic construct
  source 1..918: mol_type = other RNA
atgaccacgattcgtcgcatggacatcttcgaattggtcgaacagcttgagacttctgaacttcatctcaggcatctcgccacccggtcagagaggttttatagggagttcgtcgtggccaagaaaagcggcggagggcggaaaattgtagcaccctccgacgaccttaaagatatgcagaaaaagattgctgtcctgctcctgaataaggtggacttacacgaagcttgcactggctacagaaatggtaagtccattatcgataatgctcagcctcatgtgggtcagcactttgtgctgaatatggatcttaaagacttctttcccagcatatcttcaaacagagtcaccggactgttctataacctggggtgggaacggccagttgccatgctgctcgctcgcatcaccacatacaagggcagcttgcctcaaggggcaccgagttctcccgccattgctaacctgctatgccgtcgactggacacaagactctccaactttagtagagttagggggtggcagtatacaagatactgcgacgatctgacaataagcggccagggtactccagactcagatactgataccatatattccatcatcgagagcgagggatttacagtgaacttggacaaaacgaggacccgatttaagcaccagaggcaagttgttaccggaatcgtggtgaaccaggaggtacggattccccgcgaacagcgaagattactgcgggcaatctgtcaccaaatgtccatggagccagaaagtttccgcggcgtgtctaatcaggtcctgggccagttgtcattcgcccagatggtggagggacaaaatgcacctgagacataccgggagtcggcgcagtgtctcctggatgccaagaagctagcgcgccaagccggggctacttactga

SEQ ID NO: 13953 - RNA, 957 nt, synthetic construct
  source 1..957: mol_type = other RNA
atgctcatcgctagcagttgcaggcagagggaacccctgacggcttgcgacggccatccaaccttacgcgggggtgcaaggatgctgcagaccaccgatgacctggccgccctgttaggcgtcgaaacggccaccttggttaagttagcggatcctgccaggactcggtggcggcatcatactgttcctaagcgatcaggagggacccggcacctcttcgaaccccctcatgcccttcaggtcgtgcagcgtgctataggaagaaaaatcctggacagatacactccacacgatgcagcgaaggctttccggcgaggcgcatccgttgtggaccatgctcaccagcacgtgggacaggctttcgtctattctactgatctgcgcgacttcttcccgcagatcaatattaggagggtgcgtgggatgtttctgagccttccaggcctcgattgttccccaagcgtggccgagcttcttgccaggctgctctgttggcgtggatgtctaccgcaaggcgcccccacttcacctgcaatcgccaacctaattgcatatcgcttggacttgcgcctcacaaactactgtcagcggaggggttggacatatgggagatacgctgacgatataacaatttccggtagaggcagatttaccgcacgcgaccagcgatgggttgaagggtgcctggccgccgagggatttcctgtaaaccccgctaaaacagacctgcggcggcagcacgagcggcaaacagtgtgcggcctgctggtgaatgatcgcgtgagactgccacgccaaaccagaaagcagaaaagagccactgctcacgccctgacacaatctaccgaccccgagacgcgaaccgctcaagcacacgggaatctcggctggctcaaaatggtcggaaacgagcaggcgttggtgacacagtttcaggtcgcagtagataagagttga

SEQ ID NO: 13954 - RNA, 903 nt, synthetic construct
  source 1..903: mol_type = other RNA
atgccaagcctgtcgaagaccttgccaaccattgcgacactcttggacctggcggagttcttatctgtcagcgaatttgagctgaaatctttctgcttaagaccgaagaaattttacaacacattcgagaggcctaagcggagtggcaagggttgcaggaagatctgcgccccatccgaaaaactcaagtccgtacaaaagatcatcaaggagaagattctggactgtgtcgatgcccatgaatcttcgactggctacaaaagaggtgtgtcaatagtggaaaacgcccaggtgcacgtcggaaaaagggcattgctgaacctggatattgagaactttttctcctccattagtatgcccagagtgattgggctattcgctagcctggggtatactgaagacgttgcaatcatgttggggcggctctgttgctttgaacacgcacttcctcagggcgcacccacatctccctcactcgccaatctgatctgccacaaacttgatcggcgactgaaaggcctcgcctttaaaagtcacatgcagtacacaaggtattgtgacgatattaccctatcttccgacgaaaatatctcaggaaagttcgtggaggtggtgaaggagatcatcaaggatgagggctttagcgtaaatgaggataaaactcgcgttcttagccaacgcagctgtcaaattgttaccgggcttacggtcaatcagaaggtgaacctgccccgcgagaaaagacgtctcatacgagcttcattccatcgcgctagccagcaaacggctttaactgacgccgagcagaaaaggctggaaggactggccagtttcatgcagatgatagagcagcattgtcagaagcagcggagacgtgtctcccctaccgacatcaagtcttga

SEQ ID NO: 13955 - RNA, 1083 nt, synthetic construct
  source 1..1083: mol_type = other RNA
atgggaatactctcttggatgtttggtatcaagagcaagaagtacaattacagtaaagtggagaaggccttgggaccttggcaaccatatgcgggcagctctgtgattcacgggaccatgctgcctaagtcatttaccattccccccgctctaaagaagaagagagatgagcccgatctgactaccttttcctccgcattattcccatactggttaaggatcgacccgtcgctggcaggcttcgtcttgatgaaaatcaacagtggggaaatgtatagacaaaaggaaatccctagggagggaaaagctcctcggattatatccgttccggcccccgtactcaagttcatacagaaaagaattcttgcccgaatgctggaacagatcgagatccatccagctgcccatggatttgtaaaaggtaggacaatcttctccgctgccgagcctcacgtggggaaacgcattgttctcagcattgatctgcgggatttttttggcaccatctcctttaagcgtgttgcgggtatgttcaaggcatacgggatcgccaaaaaacaggccttcctccttgctggcctttgttgctgtcagaaaaaactcccccagggagcaccaacgtcacctgctatctctaacattgtctgcaggagactggacagccggctagccgggttgtgtaaaaagtatgacttctcatacactcgttatgctgatgacctgatattttctggagacgagagaatgctgcggttcttaaaggtgtttaaggagatcgtgcagaaagaaggcttcgcagtcgcagatgagaaaacattcatccgccgcagcggctctcgccagaaagtgttggggctgaacgtcaatagcaaggtgagtgtgccccgcaaggctaggcgactgattcgagcgatggtccatcggcaggcccaagaaggttcacccgacggcgaaatggttgactttctgcttggccacgcagccttcatgaagccagcccacccagagcagtccgctaagctgaaagaaacactggacaagacttggaaggcctacctcgtgagttgcattgccaataaatga

SEQ ID NO: 13956 - RNA, 1047 nt, synthetic construct
  source 1..1047: mol_type = other RNA
atgggactgctcaattggcttttcggaaagaagtcccataagtacaactacgggagagtggagaagatcctgggtccttggaaaacctattccggcaccctttgtatccctggtactaaactacctaagagttttactgtgcctcccagcctgaagaaaaataaggatgatgccgaacagacaacgttgagcgccgccctcttcccctattggctgagaatcgacccatcattggcaggcttcgtcttatccaaaatcaagtctgaggaaatgtacaagcagaaagagatcccacgtgaaggaaaagcgccgcgaatcatttctgttcccgcgccgattctgaaatttatccaaaagcggatccttgcacgaatgctggaacagattgaaatacaccccgcagctcacggctttgtgaagggccggaccatattcagcgccgcagagccacacgtgggaaaacggattgtactcagtattgacctcagggacttctttggcacaatttccttcaagcgggtcgccggaatgttcaaagcatatggcatagcgaaaaagcaggcttttctgctcgctgggttgtgctgttaccagaagaaactaccccagggggctccaacaagccctgctattagtaacatagtctgcaagcgcttagactcacgcctggccgggctgtgccgaaagcacaacatcaattatacaaggtacgcagacgatctggtgttttctggtgatgggagaatgttaaggttcctgaaggtgtttaaggaaatcgttcagaaggagggattcgccgtcgctgatgagaaaaccttcattcgcagaagcgggtctaggcaaaaagttctgggcctgaacgtgaatactaaagtatcagtgccaagaaaagctcgccgtataatcagggcaatggtccataaacaatcgcaggaaaagaagcccgacgatgagatgatcgcctttctcctgggccacgccgcctttatgaaaccagtgcatcctgagcaggctgccaagcttaagaacattttggagaatctctga

SEQ ID NO: 13957 - RNA, 1047 nt, synthetic construct
  source 1..1047: mol_type = other RNA
atgttcaagtaccttaaaaacatcctgggggtcaaatcacgcaagaagtacaacttcttcagaataaatcggattttgggagattggcaaccctattcgggtagcaaatgtataaaagacacaaaactgcccaagtacctcgacctaccaaaggatgtagaaaaatggggcgactacagcggacaggtgcccctgtctacagtgatctttccatactggcttcgcctctcaagcgagattgctggattcttggtgaagcaagtgaattcaggtaagctctataatgacatcgagattcctcgagaaggaaaagaccctagaaagatttccagcccccatcccctgttaaaattttttcagcgcagaatcctgactaggctgctggagcagatggaggttcatccagccgcacacggctttataaagaaccgtagtatcttcaccgccctcgaaaaacatacagggaaaagagttgtgatctcactcgacatccgggatttctttgatacaatcacgttcaaaagggtctgcggattatttaagggctatggcattaaggaagataaggcccttctactggccggtctatgttgcaggaatggtaggctgcctcagggagctccgacttccccgatgatctctaacttgatatgcaagaagatggactctagacttactggcctggcagaaaaaaacggattcagttatacccggtatgctgatgacctgatttttagtgggggggaaaacatcctcaagttcctcccaataatcaagcagatcatcaaggaggagggctttacccctgcggaggagaagaccaaaattcgacggtccggcagcaggcagcaagtccttgggttgaatgttaatagtaaagtgtccgtgcctaaaaaggtcaggcggctgattcgagctatggtacaccgccaggccttaagcgagggccgcaaccacgaaatgctgtctttcctgtacgggcacattgcctttatgtccaataagcacccagagcaggcagaaaaattgaagcgtcagctgatttga

SEQ ID NO: 13958 - RNA, 1053 nt, synthetic construct
  source 1..1053: mol_type = other RNA
atgcttaacctgctaaggaagttgttccacctgcccccggctaggcgtcgatttccctcccaggccattgaggacgtgctcgggccgtgggaaccttatgctggcgatgacgtgctgcccagaagtcgcttacctgcacgccttgaacttccacccgcggtcgccgaatggggagatgttccaggcgcacgtcgcttggaccgggttttatttcggtgttggctgaggctcgaccccacgctcgtgggattcctactctcacaaatccagcagggggagctgtatacagtgcacgaaatcgatcgcccaggcaaagccccgcgaaggattgccgagccagatagagtccttaaattcgtgcagagacgcattctggagcgcgtgctggaacagatggaaattcatccagccgctcatggcttcgtaaaaggccgctctattttcactaacgcagagcaacatacccagaaggctatagtcatcgcattggacgctagggattttttccctacgatcaccttcaagcgggtcaatggcatgttcatcaaatctggctttgcagccgacactgcagggaaactggccgggctctgttgcttccgtggaaggctgcctcaaggcgctcctacctccccaatgatcagcaatcttatctgccggcggctcgatggaaggctcagtggacttctaactaagtttggcgggacatacacccgatacggggacgatatgacttttagcggtcccgaacagatactgtcgctgctgcctctgtgtcggcgcatactcgcggaggagggtttcgagttggcgcctgagaaggtgagaatttgcagaaggggtagccggcagaccgtgacaggtttggtcgttaacgataaggtatccgtgcccagacgggttagaagatacatccgggctatggtacacgcccagtcaagatctgaccaccccgatgaagacatggtgcgatttctgaggggacacttaagctttatgcgaccagcccatcctgaccaagccgagcgtctgctgcagcagctgaatacatga

SEQ ID NO: 13959 - RNA, 1086 nt, synthetic construct
  source 1..1086: mol_type = other RNA
atggattttgtggcttatttgataatggacttgatccgacttctgacaaacaggaaagagaaaccatacgacaggaaaagggtggacaaaaccctcggaccgtggagcgcgtttaagggaccctctgccgaatgtatccctggcacccggctgcctcgcaagattgtctggcatagacccaggctactgttcgggaggaaacgcgaggaaattgatttcgcaataggcgtcatgacacattggttacgcttggagcccaagttgatgcgcttcattgcatacttcctgcgggatactgaaaagtacaaagtgcgggagataccaaggcccggaagagaaccgcgccggattgaagaaccgatggccctgctgaaatttgttcagagacgtatcttgcgaaggatcctagagcagaccgacctgcccgattgtgtgcacgggttcgtacggggccggtcaattggaacagctgccgcccctcacgcgcataaggaggttgtcgtgtgctgcgacattgagaacttcttcccaacaatcactgtgaggcgagtttggggcgtctttcggtccttgatcgtgaatcctcgcgtcagcaacctcctcgcagctctgaccacttatcaagggagactccctcagggagctccaacgagtcccatgatcgcgaatctggtgctcaggcgcctggatagacgactcgccgcccttaccagatcacgtggtatcgagtatactagatacgctgacgacatgattttttccgggggccccgacacccctaagatccttaaggcagtgcgggcctttgtcgcagaggaaggcttcacgcttaacgaaaagaagactagaatcctccggagaggtcgtcgccaggaggtgtgtggactggtggtaaatgagagagtaggcataccacggctctggaggaggcgattacgggccgaggttcaccgacttgccacaggtcgcgatggggcaaaggccgctcctgctcgtttaagaggggaactggccttcctgcaatgctttcacccagaagaggcaggcaagcacgcccgcaaactgctggctctgctaaaacagtga

SEQ ID NO: 13960 - RNA, 1077 nt, synthetic construct
  source 1..1077: mol_type = other RNA
atgggattgctggactttctgagaaatctgcttagccctcagagaggctcagacgagtcaccagcgctcaaccactccgacacaagacccaagaccgccgacgcctctccaagtcaggctgaagcccctgctacccccgcagtacgtatccgtagacggaggccactcctccccagacagttgggttcgccccctacgtttcgccgcctgatggcagctcttcgcttaagtcatgtgcgcgtgagacgggtcatgcacagtaaagcgccatatcatacctttaccatcgccaagcacaatgggagcctgcgtgatattgctgcgccctgtcgatctcttaggcacatccagaggcgcatactaagacggatcgtagagcctctggatacccacttggccgtccacgggtttaggcgtggtcgctgctccttaactggggcacggcgacatgtcggcaaggaagccgtcctggcgatggacctgcaggactttttcccatccattactagccagcgggtgtacgggttgttccgtaagttaggctggcctccgaacctagcctctgttctgaccagactctccacgtggcagggccgactccctcaaggagctccaacaagcccagccttggcaaacctgatcgctcgccggatggacaggagacttgccggtctagctcgccacaggggcatttattatactagatacgccgatgacctcactttcagcggacctgctgacgcagtgcgatccgccataccggccatacggatgatcgtgaaagaggaaggcttccggcccgccgaacataaaacccggctcatgagatgcggaaggcgccaggtcgtgacaggactggtggttaatcggcaggtgtctgttcccagagattaccgacgcagggttagggctgcactgcacgggatccgaactggcaggaccacgttcgcaacacccgctgatcgggccacaactcttcgggagctggaggggcatgtgcaatacattaggtcaattaggccggagcatggagatcctctggcagctgatctgtatgcagccgaaacaggccaatga

SEQ ID NO: 13961 - RNA, 1044 nt, synthetic construct
  source 1..1044: mol_type = other RNA
atgggcttcctcgacttccttagagacttattttcgccaaaatcatctcctggcgagcaccctagttctgctcggccaggagaacgtacccgacataagaagggagttcgcagtgcccccctactcccggagtcattaggggctaggcctacttttcactgcctggtcgggacacttggactgaaccatgttcgggttaggcgcgtcatgcactccccacacgcctatcacactttcactattgctaagcgggggggcaaactgagggaaatagccgccccctgtcgctccctcaagcacattcagcgcaggatattgcaccgtatcgtggaaccccttgacaggcacgctgccgtgcatggattcaggcgtagacggtgctccctgacaggggctcgaaggcatgtgggcaaagaggccgtgctcgccatggatctccaggatttttttcccagcattacgtctcagagggtgtacggcctgtttcgaaagctgggttggcctcaaaatctggcatctgctctgacaagactgactacctggcaaggcaggttgccccaaggagcccctacatcccccgcactggccaacttgatcgcacgacggatggatagacgcttggctggcctgggacgacatcggggtatctactacacccgctatgctgacgatctggccttcagcggtccagcggaggttgtccgtagcgccattccgagtattcgcacaatcatccaggaggagggtttccgcctggcggagcataaaactagattgatgagacggggacggcggcaggtagtaaccgggttagtggtgaacgagcaggtgtcagtgccacgggactaccggaggcgagtcagagcagcactccacaatctgcgcaccggcagaaccacgtttgctgcagtcgcggaaagggctgccgcacttagagaacttgagggccacgtgcagtatatcagaagcatccgcagcgaacatgccaagcatctagaagcagacctgtatgccgccgcggatgggatacagagatgtctctga

SEQ ID NO: 13962 - RNA, 1113 nt, synthetic construct
  source 1..1113: mol_type = other RNA
atggggtttctggactggtttctgcggaagatcatcaagcccaaagtcctggatggatgggccagagcacgaaggaggggacagatcaatgcactccgtaagaagcgtgaacgagcgagagcaatttgcatgttgccccaggacggacggcttccaacgaggaaggcccgcaaccccatgaccgggaggaccatcgaggttgaatacgacgacggcctgaaaggcatagctaaagccttgggtctgaaaccgtctcgggttgctaagctgagcttcagtccaaagaagttatacactactttcacccgccctaaacccgcaggaggcgaacggacaatccatgctcccgtccgatcattgaagtatgtgcagcgaagaatcttagacagaattctcaattgggtcgatttgccagactgtgtgcacggttttagacgctacaggtcgctcgccactggtgctgctgaacatgtggggaaagagatggtgttgaggatggatatcgaggattttttcccttcaattcacttcggccgagttctcgggctattccgtagcctgcagttcagtacaaaacatgcctttattcttgcgcgcctcactaccgcggatggggtcttacctcagggcgcacccacatctcctgcaattgcaaatgccgtttgccgccgactagatagacgcctcatgggggctgctcagaagcaggggataagctatacccggtatgccgacgacatgaccttctctggcccagctgaagaggtgaagaggctggtcccgtttgtgaggaaagtcgttggtgaggagggcttcacagtagccgacaagaaagtgcgccttatgagacgggggcgcagacagattgtgacaggagtggtggtgaacgataagctgtccgtacctcgttattacagacggtggctgcgggccaccatccaccatctgagaactaggggagccacgccagatggactgacagctgcgcaacttcggagctccctgctgtcccacgcccactacataaagatggtgaacgccgaccagggcaatcgcctactcgccgatcttcgggaggtactgggccaacaaggtggcaaaggaaacaggtga

SEQ ID NO: 13963 - RNA, 909 nt, synthetic construct
  source 1..909: mol_type = other RNA
atggggattctagactggttggcgagattgctgcgcggtggcggtgaaagtccttttgccgccggaaggaagggcccgaggttaggtctgaaactcaacaggctgtggcatctggcccgcaacgtggagggccactactccgagtttgatctagaaatgcccggcgggcgtaaacggcgaattgaggctcccgatgggaagcttcgctgggtacagagaaagatcctgcgaaatgtgctggatcggcaggagcaggggccttgctgccatggtttcagaaagaagcatagcatcgcaacaaacgcagccggacacgtggggaaggagatggtgttggctgtggatatagaggactttttcccttctatcacattccccagggtatacggactgttcaagtcaatgggctttgacaggggaagaagcgctctgcttgcaaagctgacaactcgtaacggcacacttccacaaggggcccctacctccccagccatcgctaatctgctgtgtcggcgcctggacagaagattaggaggcctcgcggctaaagccagaatgacgtacaccaggtatgcagacgacttaaccttcagtggcagcgccgatgccgccaagtatcttcggttgatagtcgaaatcgtgaaagaagaaggctttgcactcaatccagccaaaactcgaatgatgcggcggaaccgcaggcaagaggttaccggactggttgtcaatgataaagtgggcctcccccgcgagtggaaaagaaatctcagggctgctctccaccacctccgtactggtcgaccagcgtcagacggaccggaaaaaattcatgggaagctggcattcctaaagatggttcaccccgaacagtatgtccgggagcttgctgcactgaaagccttgtcttga

SEQ ID NO: 13964 - RNA, 1485 nt, synthetic construct
  source 1..1485: mol_type = other RNA
atgagcgacctggagcagctgctcgtaggcctggacgctgaaagcgccagcggacgaatgcacgccattcagagaagcactgcttatgacaagcccacacgatctgcctttctgttaaaggccttagaacactgggacagaaaggtccgggagaaatctgccaaaatcttgctcaagatcggcggggacttagagctggccgcagtgtgtagcgcagtggactccagaaaagtgcctctcctgcgccttattccatggctggcacgccggaatcatgccctgactactaggacaatctataacctgacacaacattcacacaaggtgatctccgaggctgcatccaaatacttgattaaaatggatacgaccgaggctctgttttatagatggagtaagcagagtaggattccaaaaaaactcgctgcccagatcgaagcgtgtgcgtgtgaacgggtcgcttccgtcttgtctgacattcccgtgtccgtgatccatacgcttcgcgggaagtttcttaggtatccactcctgaagaaatactaccacgacaagtattcggatagccggccccaatcatcaaaagaaaccgtcagtccgaaggctcctaaagttcagagtgaatacgtgcaaagctggaataagctcggcattgactggaggattgcagggtggattgtgcggaactggtcagatttggatgatgtgggctacttcgagttcaagatccctaaaaaaaacggtaccgagcggatcatcagcgcaccagtgactcccctaaagattgcccagcgtgttgtcctggacaaaatactgtctaccgtcccacaacacgatgcttgccatggcttccgcaagaatttctcgatcattacaaatgctacaaagcacacggggaaggatgtcgttattcgcatcgatctaaaggatttttttcctagcatcaaacccgccaggatcgctggaattttccgatccctgggattttcagacttcgagataaggttcctcacccgcgttaccacccgaggtggtggattacctcagggcgccccctctagtccttgccttgccaatatcgtagcgaggaggcttgatagtcgcctgaatggtctagcggcctccgtggggggaacttacactagatacgcagatgacttgataatttcaggccacaaaaacgtggtgtctatcctgccggccgttaaatccataatacaggaagaagacttcgggatcgccagtgagaagctgagaatagcaagaaagggagctcagcagaaggtaaccggactcatcgttaaccagtgcgtaaacgccccaagagagttgcggcgtaagctgcgggcggtgtttcataagcagtccaaaggcgaggtgccctactggggcaacaagccgatgagcgagtcacaaatgcgtgggtatcaggcattcctctcttctatcgagaagtccaagacagaccagcacgaaaaactttga

SEQ ID NO: 13965 - RNA, 1356 nt, synthetic construct
  source 1..1356: mol_type = other RNA
atgacaaagaaagccaataacaacgcctcagatatgttcggagctgtcgccgagaaaaggtattctgccgtgaaacgggtttctaagttacccgtcgaagaggcgttgcccatacttaaaaagggtctgaaacactgggaccggaagcttaggaacatgtgtagccgcgagatcgtgaggaagttgggagggaaagcggcttcaatcgtgttgccgctatatgttaaaggcctgcttagtcgatcgtcaagttacgaacagctcctccgaaaggaagacgctacgctgaccgggtacgtgctcagaagatcccgccgaaaagattctcttggccaagtctgcaaaggtctgtactctcagactaagcactataagaggattcaggaaaaacagactaagcgtgatcaggagttactggcagacaacgaccgggcgggccaaacctgggttgctcaaaagatttcaccctgggatctgctgaaggagagattcagcatccttaaggaactcaaagagaacacagcccagttcgtgttaggacactggtatcgaaataataccttcgatgatctctacgacacttttgaaattccaaagagatccggcggcaagcgcaagattgaggcccccaaacccgctttgaagctggcacagaaggccatccttgagaaactgacaagtgacgtgcgtttgcacgacagctgtcacggatttcggagggcacacagcatcgtgtctaatgcaaagccacatgtcggcaaagccgtcgtagtcaacctcgacatcaaggactttttccctaccatatccgcagccagagtatttgggatatacagaagcttcggttacaaaaatgaggaagcttcctttctgactgcattgtcctcgtttaatggacgactgccacagggagcgccaacaagccctatgctagctaatatcgcctgcattaggctagattaccgcctgtccggactctccaacacaatcggcgccgactattctcggtatgccgatgacctgaccattagcgggcctgagtctattaccaaatacattgctctcatcaggaagattgtggaggaggaagggttcgctctggcactccctaagctgcgcatccatagaagaggcgcccgccaagaggtgaccggtctgacagtgaacgatcgggtttccgtgccccgggttatccgcaggcgtatacgggcagctctgcatcatgtgaaccagggcaaagaggccacttggaagggcgaaccgatgagtctcgaatcactgacggggcatatcaactttattaagagtgtacaccctgatctggggcaggccctgttcaatagcttaccacagtga

SEQ ID NO: 13966 - RNA, 1023 nt, synthetic construct
  source 1..1023: mol_type = other RNA
atggacaagcgctccagcgctgccgaccggaaaggcaacgatttcgtggagcccaacggggacctggtaaagagcgccgggaatggatggctgtttgacttatctagggaactcgatatcagttgtcgagatttgggttggttacacggaacgtggggtacttggaaccagtggtataagacctatacagtaccgaagaaaaccgagggttttagggtgatttgcgcccctcagggattgctgcttgctgtccagagaaagatcaacgatgtcattctcaaagaagtcgtgctatctagctgttgccacgggttcgtcaaggaaagaagtatcatcactaatgctgcagctcatgttcagaaggaagtgctcctgagtctcgacatcaaggactttttctctacaatcactgcaaaccgggtcttcggcgtatttaaaagccttggccgctcccctgaggaggcacgttttctcactagactgtgtacctataatgggtgcctcccacagggtgcgccttcatcccctgccattgcaaaccgggcttgtaatcatatggacaaacggcttgccaagttggccgaatatcaccgcgccgcttattcccgatacgctgatgatctgacattttctggcgataagccagtgctaaggctgctgccattaataaaggccatagtggcggaagagggcttcgccattgccgagcacaaaacccgcgtggcaaaacaaaatcagcgacaagtggttaccggactgaccgtgaattccgagattaaagtgaggcggccagagaaacgcagaataagggcgatcctccatcatgctgcctgcagacgtagcacaacgtcacaccaagttcccattggagttcaggaaatcaggggctactacagcttcctgaaaaatgtggaaccggagtacgcagcaaagctgtacctggacttgcacgagaagtacctgatgctggaccttgcccccgagacaaaccccttctggcttagtcagcggtcatcgagatga

SEQ ID NO: 13967 - RNA, 975 nt, synthetic construct
  source 1..975: mol_type = other RNA
atgatcgagattttggaatatattctggcccctatcggagggctcatcgtcctggtggtgatagccatatccatctttaggtttactcgggccacaaacggtcacttctggcattggctcagggccatgctcggctggggcaaagatatccgagaagtcgcggctcgcttgggtatgacagaacaggaacttcggaatgtgagtccgtcctttcgcgaggtgttcgtgcccaagaagcggggaggacagcgacgtttgctggtgccagatgccgatcttaaaagcttacagaggaggatcttgcatagactcttaaagaagctgagagcacaccctgctgcacatggctttgagaggggcagaagcatcgttaccaacgccctgccacacaaagggcagagggtcgttataaagatcgacctggtggactttttcactggaacaaaggccaaccgaattgaacagtattttaggcgaattgggtggaatgccgacgtagctgctctactgaccagactgtgcaccgcagaggggagtctcccccaaggtgctcccacaagccctcgtctctccaatctggtaaacttcaatatggactcacgcattgcaagggtcgtgcagcaacgtaacgggcagtacaccaggtatgcggatgacataactatctctttccctgaggattacccctcacggattcgaggcgtaattcagcgcgttaagagaattgtgaaacagttcggctaccgtatccacgtgcgcaagaaactacagattctgagatctcaccagcagcagagagtgacggggctggtcgttaatcggaaagtccagcttccacggaaggttcgccgctggcttcgcgctgtgcaacatcggttaaagacccggggctcttcgactctgacggcaaaacaactggccggctggagaggaatgcagatcatgatcgagcagcaacggcaaagaaccggatga

SEQ ID NO: 13968 - RNA, 975 nt, synthetic construct
  source 1..975: mol_type = other RNA
atgatcgagctgttcgagtacatcgccgcctccgctggggcacttgtgattctcttgactgtcgcagttactgcactgcggttcaattacgccatcaacggtcggtattggcactggctgcgcgccctatttggctggggaaaggacatacgcgaactggcgggccggctaggaatgacagaacaggagctgcgcaatacaactccctcgtttcgcgaggttttcattcctaaaaagcgaggcgggcaaagaaggctcctggtgccagatgcgggattgaagacgttgcagcggagaatccttcaccgcgtcttaaagaagctgcgtgctcatcctgcagcacatgggttcgaaagggggcgttctatagtgactaatgcgctgccccataggggacagcgggttgtcatcaagattgatgtcgtgaactactttaccagtaccaccgctaaaagaatcgaagattactttcggaggattggttggaacgctgacgtggccgccctgctgacaagaatttgtacggcagaaggaggcttaccccaaggcgcccccaccagtcctaggcttagcaacctcgtgaactataacatggacagccggatagcccgagctgtccaatcccgtaagggccagtataccaggtacgccgacgatataacaatttctttccctgagaatcacccaaaacaggtgagaggtattatccagttagtgaaacgcctcctgagacagtgcggctatagaattcacgtgcggaaaaagctgcgaatcctccgatcccatcagcagcagagagtaactggtctggtcgtgaataggaaagttcagcttccgcgaaagatcagacggtggttgagggccgtggagcaccgtatgaaaaccaagggctcagccagcatcacaccagtacaactcgctggctggcgcggggtacaagctatgatcgacaggcagcgcgaggggtcaggatga

SEQ ID NO: 13969 - RNA, 993 nt, synthetic construct
  source 1..993: mol_type = other RNA
atgaataccctgttcgcagatgcgaatgtagttctgctctggggccttgctctcggaggcggattcgtggtcttggtggccagcctgtgggtgtcttacagagtggtgagggctacaaacgcacggcctctagagtggctccgagttcggcttggtcgcggcaaggacctcacgactctagccgccagattgggggtgagcgttcaagagctgcagggggtagagctgttctaccgcgaaagcctcatccccaagaaaaggggcggtcagcgacgcctgcttatccctgatcagccactgaaggctatgcagagacgggtcctccgcaggcttctcagaaggctgagagcacatccggcagcgcatggttttgagcaggggaaatccatagtgaccaacgctctgccacacgttggacagtgcgtggtgattaaaatggacctggtggattttttccctagtactaccgcccagagattggatgcctatttcagacgcgttggatggaacgctcaggccgctgctctgcttgtgaggctcgtcacgcatgccggggtgttaccgcaaggggctcccacaagtcccagattatctaatctggtcaactttaacctggacgcgcgtatcgcccggtttgtggcaaagaggaagggcgcatatacacgttacgccgacgacattacaatctcctttcccaaggatcatccacggaaggtcaggggaactattcagaaggtaaaacggatcgtccgcgatttcggatatcgcatccacgtccgtggcaaactgcagattttacggaagcaccagcaacagcgagttaccggcctcgtagtgaatgccagagcacagctgcctaggaagctgcgacactggctacgagccgtggaacacaggcttcggactcgcggtgaagcctcactgtcaccacaacaattggccgggtggcgggctttgcagggcatgatagcaaaacaggcgaaaaccgactga

SEQ ID NO: 13970 - RNA, 1086 nt, synthetic construct
  source 1..1086: mol_type = other RNA
atgaggcctgtcagacccgtccgtccgagagaaccaaaggcaccctgggcctttgctccagctaagcagggggtggctggtcccgagtatagtgggccagtattcttagtaaattcgctattcacgtttcctagcaggctctttccccggcgtaggagactggcctctctggtgaaaaagtggctcaggtccgtgtggagactgttccgcgttaaaaaacggaccgccgatgaattggcacgcaggttagatgtcagcctcgcagaattactggattggacaccctcctacagagagacaatcatttcaaagaagcgcggaggcactcgccgactcctgattcctgatgctaagttgaaggccctccagcggcggatcttgcacaaagtcctgagaaggctccgcgtgcatcccgcagcaaagggctttgaaagagggcagagcattgtggataatgctggcccccatgtcggccggtctgtggttataaagatggacatcgttgacttctttccaagctgtaaagccgaggaggtgaccgcgtacttccgaaagatagggtgggacgaagcggcgggcgtgatccttaccaaactgtgcacgcatgagggacggctgccacaaggtgccccaacttcacctcggctgtctaatctgatcaactggccattggacgcgcgcattgccaggtgggtggcttatagaaaaggagcctatacacgatacgccgatgacataacaattagtttccctaaagactaccccaggaaagttcgtggggtgatccagcaggttcgaagggccgcccgaaaacttgggtttcaaattcacgagcagggcaagttgcgcatcctgaggcaccatcagcagcagcgtgtaaccggtcttgtggtcaacgagaagcttaacctgccacggagactacgccggcttctcagagctgtggtgcaccacctgcagactggaaagcccgcttccatgaccgccgagcaactggcaggttggcaagctctggccaacatggtcgcaaagggcgcagccaaatatcctgcaccggcttcccctaagtcacctggaaaaccgtga

SEQ ID NO: 13971 - RNA, 1056 nt, synthetic construct
  source 1..1056: mol_type = other RNA
atgatgcagagacatgtgtttgcacatgccgagcagggagggccaattcccggcaatccagctaaagggttcctgtggttatttgctattatctttgctgttctgaccgtggtggtcatctgtgtggctattgtgctgtggctgcagcgcttagccctgctccctaagccacatgaaacgcataggaccgaccgaaggaggacccggcttggaagaggcaaggatctcgcggaacttgcacggcgtctggacacctctgcacagaaactacaaacagcaaatcgccgataccatcggttcactacggctaagaaacgaggtggcaccagggtcttgcatgcccccaatcccgagctcaagcacctccaaagactgatccacagacggctcctgagaaagcttcaggtccactggtgcgcaactggattcgaacctggcgtgagtatcgcgcataacgcagcttttcacgccgggcaggccgtcgtgatcaagctggacctgaaggatttcttccccaacactaccgccgaacgtgttgagcactattttcggaggattggctgggatgccgagtccgctgctctgcttactgaactgtgcacccacgagggtggattaccgcagggtgcccctacaagccctaggttgagcaacttgataaaccacgtaatggacgcgcaaatactgcggtatgtggaggcccaccacggcacctacactagatacgccgacgatatcacagtctcttatcccgaggattggccgaagtatgtgagaggaacaattcagcacgttcgccgaacagccaaacgccacggatacaccgtccatacaagggggaaactcagggttgtgcggaggcatcagcagcagagagtgactggcttggtagtgaatgaccgggtcaatctaccacgcgaaaaaagacgctggctgcgcgcagttgagcaccgactgaagacgcaggggcgtgcttccttgacagcccaagagctcgaagggtggaaagcactttcacaaatggtagatcgccacgccaaccctgaggcgggctga

SEQ ID NO: 13972 - RNA, 1047 nt, synthetic construct
  source 1..1047: mol_type = other RNA
atggggacccagagtatcgaactcctcgctgggatcgatccactggccaaggtctgctttgtctcctgtggcgtaccactgattacagtggtggtaattttattggttggctcgaagcgcggctggttcaagccctataaggaaactcataaggtcgagcgaaaaagggcagctaagggtctggggaaagacatagaggctttggggcataggctccagactcctcccgacgagcttagaaattttgaacctaaataccgcctggcatccatttctaagaagcgtggcggccgtagacggctggatatccctgatcacaagaccaaaaccctgcagagaactattctaaggaagctcctgcgcaacctaaaaacacactcttgtgccatggggtttgacccgggcatctcaatcgcccataatgcagccgttcacaccggccaggcggtggttattaaattggacatcaaggacttcttccccgcaaccacaaaagagagagtcgagcagtacttccgccgagtgggctgggatggagaatgcgccgcgttgttaacgggactggtcacacataatgacggtctgccgcagggagccccaacttcacctcgactcagcaatctggtgaactatgtccttgactgtcaaatacagcggtacgtgctgaagcataagggaacttacacccggtatgccgacgatattacggtgagctatcccgaggactggccaaagtacgttagggggactgtgcaaaaagtgcggagagtatgcaggcggcacggctacaccgtacacacacgcaaaaaactgagaatcgtgagacgtcaccaacaacagcgggtcacgggtttagttgtgaacgagaaagtgcagctcccaagagagaagaggaggtggctgcgagctgtggaacaccggctttccaccacaggagaggccagtctcacagaagaacagcttgctggttgggaagcactgcagcagatgatagatcaacaggctcgccccgggaggggaagcatgaacgagggagatcctgagtga

SEQ ID NO: 13973 - RNA, 1017 nt, synthetic construct
  source 1..1017: mol_type = other RNA
atggggaacttcggacgcaagcgtaacgccgatatctttacgtggctcgtgctgtgtttgcttgctatcatactgattttcgcattcccaatctttatcctgatcgaattgatcaactgcttcttccccgatcgcctggctaagaagcggtacagacatgtattcagacatatctgtggcatgggattaaagtcagatgagctggcccgtagactcggcatgaccgtggagcagatacaggctacccctcaggactatacaacacggaaaattcccaagaggtctggagatcaaagagaactcaatattcccaacgagcagcttaagagcctccagcgctgtattctcaaagggctgctatcaaagctgaagactcatccggcagcgatgggtttcgaagaagggtatagcattgctcataatgcgatgctgcatacacagcaagccgtggttattaagatggacattaaggacttctttcctagtatcaccgccgccacgatcgagttttactttcgggagataggctggaacaagcgggcagcgttcttactaagtgagctgtgcacccacgcttaccaactccctcagggcgcaccaacctccccaaaactctccaatcttgtcaattacatgatggactaccaaatagagcaagccgtgaagcactatcacgggacttatactaggtatgccgatgacatcacaatatcttttccgaaggattaccccaaacacgtaaggggcatcatgcagaaggttcgatgcattacaaaatttcacggctacgaactgaatcacaaaaaaacccatatcctgcgacagcaccagcagcagagggttactggactggtggtgaatgacaaagtcaaccttcctcgagagaaaaggcgctggttgcgggccgtcgagcacagattgcagacccagggtaaagcctccttaacacaggaacagctggacggttataaggctctgcaacaaatgattgccagccagactcagccaaaagcatga

SEQ ID NO: 13974 - RNA, 1116 nt, synthetic construct
  source 1..1116: mol_type = other RNA
atgttcaggagatccggccggttcgtgacagcctccgactctagggttcgcgtgcgccagttcagagcggaaatccccgacaccaaacaggatgtaactgggactggacttccagtgccagtctttccgagtggcggggtgatgctggcatttaacctgctgtcccagttggtaagcttcgccctcgtcgtagcttgtttgttcggcgtgggcgtctgcctgcatataagatatcggcgggtaaccaatagcaatctgcgtcactggttacgggcaagacgtgggcagggattggggatcgacgagctggccaggaggctcgatgtctcagaggacgaattgcgcagtgttgacgtgggttaccgggaggcatttatctccaagcgaagtggggggtcacgccgcttgctcattcccaattcagaactcaagcgcctgcagcgcactattctcagaaggctcctgggtcggctacgtactcatgatgcagtgaccggtttcgagcgcggtctgagcatagtcgagaatgccgctcctcacgtgggccaggcagttgtcattaaacttgatgtcaccgatttttttccatccacaagagccgaccggatcgatgcctactttcgaagagttggctgggacgctgaatgtgccgctctcctgacaagggtgaccacgcacgaggacggacttcctcagggggctccgacatctcctcgactgagctcgcttgtgaacttcggacttgatagagctatcgagcggtttgtgtgcgataggaggaggggcgtttataccaggtatgcagatgacctgaccatttctttccccaaggattaccctcgaagaataagagtggttgtccaattcattgcccgaaggcttcgatgcgacggatacgctctgaatcgaagcaagatccgcattctgaggcagcaccaacagcagcgtgttacgggcctcgtggtcaacgactgtgtgaacgtgccaagacacatccggcgcaagttacgtgcggtggaacatcgcctaaacacaggacggtctgcgactatgacacgggagcaactggccggctggaaagccttactgcaaatggtggaacagagacggccctga

SEQ ID NO: 13975 - RNA, 1011 nt, synthetic construct
  source 1..1011: mol_type = other RNA
atgatagatgccgttttcaatggcattgagatagccgccaaagcttgcctgtcaatcactggggttatctttttggcagtgggagtattaatcgcttattttctctggaatctcagcacattgaagagagcacgtccggccaaccttaagcactggaaccgcgtgcggagaggagatgggttcggtgtggaagaactggctcgcagacttggcgtgacctccgatgagctggccgctgtctctcccaattacacagagaggttcattgaaaagaggagcggaggcaccagacgcctgctggttccctctcctgagctgaaagaactacagcaaaagatcctcaggcgtctgttagcacgattgtcagtgcatcctgcagccaccggttttgagcccgggacttcgatcgtacacaatgcggctcagcacgtggaccaggcggtcgtagtctgtatggacgtgtctgacttctttcctcagactagtgaagccagagtgaccgcctacttccagcgcattggctggaatcgggagacggccgagctgctcaccaggcttacgacttgggagggcggactaccacagggggcaccaaccagccctaggctctccaacttggtgaaccatgttctcgatgccaggattgagcgctttgtcgaatgcaggaaggggaattatacacggtacgctgacgacatctccgtcagctttccaaaagattacccaaagagggttcgtggcaccgtccaggtagtcggccgccatctgaaagccttcggctatcagctgaacgctaaaaagactagaattctgcggcagcaccaacagcagaaagtgacaggtctggttgtgaacgatcgggtgaacgtgccccgaaatatccgccgaaagcttagagcagtggaacaccggctgaataccggacaacgggcgacaatgacacgagagcagttcaacgggtggaaggcattactcgctatggtggaacaacaaagagacggaagtcagtga

SEQ ID NO: 13976 - RNA, 1119 nt, synthetic construct
  source 1..1119: mol_type = other RNA
atggccgagctcaaaaagacggaacccaagaagaccagcaaatggagcggctgcctggcaattgccctcggactggccgtcgttggatggtgcctttatagcattgtgaggggtgttgtgggactgtttcatatggggcccgtgacttttggggtggttgcaggcgtgatcggactcgtgatcgcctggtttgtggctaggtcctggtggcgaaagggaggacgcaacgccgtgcgtagagctttctggatagctcccggtgtggctgagttggccagacgcttagatgtaacgcccgaaagacttcggaccttttctccagtctaccgcgaggtacgaatccctaaacggagtggcggcgttcgagtgttgcatgtgccggacgctaacaccaagtcgttacagcgtaagatcttgcaccgcttgctggcccggctgaagtcacaccctgcagcctatggcttcgaagccggtaggtccatagcccatcacgcggcccagcataccaaacgggcgattgtcctacacttcgacgtggttgacttcttcccgagcaccagagccgagaggatcgaaaggatgtttttaagactggggtggaatagggaggctgcgctggtgctcacaaaactgactacccacaagggcggactgccacaaggagctcccacatcccctcgccttagtaatcttgtcaatgcaggcttggatcgcgcactcacaaagcgggtgggcgaactgaggggtagatactcacgatatgccgatgacatttccgtctcattccctaaggaccgtcgcgggtctgtggagcgaacaaaggccagagtaatgcacgagctgtgtctgcgcgggtacgagatgcacgtccgcaaaaagctttctgtacggcgtgcccatcagagacaggtcgtcactggcctcgttgtgaacgaaaaggtcgctctgcctcggcacctcaggcggaaactgagggcagctcggcaccatctggcaacagggaggccagccacctggactgacgagcagctaagagggtgggcagcatttgaaaaaatggtgagagatcagggtgcgcccccaccacaagatggggatggcactacaccaaaagcttga

SEQ ID NO: 13977 - RNA, 1038 nt, synthetic construct
  source 1..1038: mol_type = other RNA
atgacagtgggctgctggtttgccctcctcgtaatgttgggctcagtcgtcggtgccatcctcgtgaccccctggtctttagctgctactcctgccgctgttgcactcctgctgacctttcacggactgcgccacaggtatggcgcctacccatggcggagacttcgtgcccatcttggctacggacacgggattgacgagctggctaggcgtcttgatagacccgctgctgaacttcgcagtgccgctccggtctatcgagccgtggacattcccaaacggagaggtggcactagacgtttgcacgtgcctgatgcggccactaaggccctgcagcgaggcatcctgcaccgacttctgaagcggctaagggcacatggagcggcccatgcctacgaacgcggaaggtccatcgccacgaacgccgcacagcatgtgggcagagcagtggtgctcaagatggacgtcgtcgatttctttgcttcgacctctgcggccagggtcgagaggtatttcaggagaatcgggtggaatcgtgaggcagcagctttattaacccgcctgactactcacgagggagggctaccccaaggtgcgccaacatcacctagactggccaatttggtgaacaggcacttcgatgtgctcattgaccgcacaacccgccgctttcgagggacatacacccggtacgccgatgacttgacaataagcttccccgaggattggccgcggaaaatgcgcggaatggtgcagagagtgagaaaagttgcaaaagctttcggctatagggtacacgggaagccaaagctcggcatctttcgggctcaccagaggcagctggttactgggctggttgtaaaccaacgggtggcactgcctcgagaaacccggaggtggctgcgagccgttaagcatcgggctcgccatggaaaagcaacaatcacctccgcacagattgccggctgggacgcgtacgctgccatgataggtggagccacgagccctgcaccaggtccagcagacagaggggggtga

SEQ ID NO: 13978 - RNA, 1047 nt, synthetic construct
  source 1..1047: mol_type = other RNA
atgcgcgatactcgaggtcccgtgtggaaacttctaacggctatcggcatggtgctggctcttctcgtgctgattcctctgtttgtcgccgcccttatcctagcactgccatttgtggtgattttaagcggatatagcagataccgcctcgcgaccaacggcagacctataaggtggctgaagctcaagttgggatgggggctaggcgtcagggagttggctcgcaggctggaaatgccagccgatgaattgcggcggtttcagcctgtgtaccgggtggcccggattcctaaacgaagtgggggtcagcggactctgttcattccagatgcagccaccagagccctccagagacggttgcttagaagagtgcttcgtcggctgaaagcccatccagctgcctgcggattcgaggctggacgttcgatagttgacaacgcccgtcctcacgtagggcaagcggtggttatcaggttggacgttgtcgactttttcccgtctacaactgccgctcgcgtcgaaagatactttagagccatcgggtggaatagggcggcggctgaattgctggtacgactgactacccatgagggcgggttaccccagggtgcaccaacatccccccgcctttctaatctcgtgaattacttcctggacgtcaagctcgatagacacgcacaaaggaggcgcggcgcctatacccgatacgcagacgatatcaccatctccttcccccgggatcatggaaggagagctaggggcacagtccagtatgttcggaggctgctgaaggcacatggctatcagctgcaccgcgacaagaaactgtcaattcgccggcgtcaccaacgccaacaggtgacgggtctggtagtgaacgagacagtccagctgcccagagctacccgcaggagactccgagccgttctccatcaccacgagactggacgaccggccacaatgaccttagagcagctccagggctgggccgctttacaggcaatgatcctgaggcaacgggacgggaaccccgacgaagcatcatga

SEQ ID NO: 13979 - RNA, 1056 nt, synthetic construct
  source 1..1056: mol_type = other RNA
atgccagctaaggcaacgtttcagatggctactggttgttgtctctccgcggcgacggccgttgtgactttcttttggcttctgaattcagatagtcagattagctttgccataatgtccgttctgttggtcgccatttgcgcgaccatgctgtttggctggtggacagcattcttgcagctcactagtaaacacccatggcattggatccgcaccaaatttggttggggattcgagattgaggaactggccaacagactcgggtacagcgtgaacgagctgactgagcaccagccgcagtatgtgagcgcattcatccccaaacggtccggaggcacccgggaacttcgcatccctgataagaagactgctgagatacagaaaaggattttgcaaaggctactgagcaagctgcggtcacatccttcagcctgcgggttcgagacaggaaaatctattgtgcacaacgcactgccacacgtagggaaagctgtggtgattaagctcgacgtgatcgacttcttctcttcgaccacagcttctcgtgtcgaggcctacttctgccgaatcgggtggaaccgaaagagtgccaagctgcttaccaagctcacctgtgatcaggacgctcttcctcagggagcagctactagtccccgcctgtctaatttagtcaattacctacttgatgagcagctggtcagatgcgcaacgaagtaccggggcgagtattcccggtatgcagacgatattacatatagctttcgcaaggacagccccaaaagaatgaggggcataatccagagaacaagacatctcttgaatcggtccggctaccaattaaatactgaaaagcagcgcatcttgcgacaacatcaacgtcagaccgtgacaggactgaacgttaacaccaaagtaagcctgtccaggaagctccgtcgcgaactaagggccgccaggcacagattagaaaatggcaaagaatcaacctggaccgctgaacagctgcaaggttgggccgccctggagcacatgatccaggaacagacaaagtcttga

SEQ ID NO: 13980 - RNA, 1056 nt, synthetic construct
  source 1..1056: mol_type = other RNA
atgtcagctcggagtactttccaaatgacctctggctgtggttgtacactcatggtcctggcaggcggaatcctgctcgccaatcaagctagcggcgctgtggtgatcttcgtgctttctgtcatttcagtgtttgtattcgctgggtggttaaccgcactgttccagatgacttcaggcaatccgcagcacgcaatacggagctggatgggctggggcttgacagtgtccgaactggccaggcgccttgatctatcagagcagcaactgattaaccatttccctaagtatattgaccgcccaatccccaagcgttccggcggtacccggattctccgtatccctgatgctaccacagccgacattcagaaaaggatactgcagcggttgctgcccttgctcacttcccacagatgcgcaacgggatttgaggccgggcttagcatcgttgacaacgcgctgccacacgttggacaggcggtagtcataaaactggacttggtggacttttttcccaacacgcaccgcgataggctcgagctgtactttaggagaatcggctggggaaaggaggccgcgtccatcttggtgcgcctgacctgcgatgaagagggtttgccacagggggcatgcacttcgccacgactgagcaatcttgtcaatttcttaatggacgagcagctggaccgcctagccaagtctaggaaaggggtgtatacccggtatgccgacgatattaccttttctttccctaaagattacccccagagagtcagaggtatcattttaaagaccaggtggatcgtgcggaggttcggataccaactcaacagcaaaaagcagctgatcctgagacagcatcagagacagtctgtgacgggactaaatgttaacacaaaggcatgtcttcctcgagaactgcgacgccgtctgcgagccgctaggcatagaatgaaaactacagggagcgctacatggactgaagagcagctccaagggtgggccagtctcgaatccatggttgagagtcagacagcctccgagagtgaacggtga

SEQ ID NO: 13981 - RNA, 996 nt, synthetic construct
  source 1..996: mol_type = other RNA
atgatttcacaacattttatcgccgtgtcaggcagcgatattttccagtgggcttggaagttaatgttgctggtgttcgttatctacataattcgggttctgctggacttgcgtgccctgaagcacgcagggaaccgaaagacagcaaggagagtggccaggggccagggcttagacatggcggagctggcacgacggcttgacatcgccgaaagggatctcgagctttttaagcccgtctaccgcagtgctaccatccctaagcgtaggggaggaaccaggaaactgaggatccccgacccaccaactagggccatgcagaggaggatcttacacagactgctgaagaggctacaagcccacccagcggcatgcgggttcgaacctggtaaaagcatcgtcgacaacgcactcccacatgtgtgtcaaagagtggtgattaaactcgatgtggtcgattttttcaccaataccactgcccctcgggtgcagcggtattttcagtgggtcggctggaatcgcccggctgctgaatggctggcaatggccactacagacgagggcggactacctcagggagctcccacatccccccgactgagcaacctggttaacttctacatggacgtacagttgtccaaattcgctgcccggcgtaagggtgaatacacgagatatgccgatgatattacctttagtttcccgaaagattatccaagacgcgttcggggcgtgattcagtttgcccgcagaatacttcgttctaaaggttatgagctgaatgggcgaaagctcagggccttgcgacgccaccagcagcaaagagtgactgggctcgtcgtaaatgacacggcaaatcttccccgccgcactcggagatggctgagagctgtagagcacagacgccgcacaggaggccagcctaccctctctgacgatcagcttgcggggtggcaggctctccggcatatgataaacacccaacggacaggttga

SEQ ID NO: 13982 - RNA, 1035 nt, synthetic construct
  source 1..1035: mol_type = other RNA
atggtcagtgtgccctttttaatcggcctgtcagtggctgcagtggttgccgttctgatcgggctgcgcttgggaaggaaaagggactccagtttcgacagtgactggcctaatgactcgcctggaccccttgcgcaggagcgaacagcacaaccgagcgcccagacaaagaagagcaagaagcaaccaggctatgccgccagattcgatctcgcagaattagcccggagattggatgtgccagagcagcagctcttggcggcagagccgacttatcgcattgcaaaaattgcaaaaccctctgggggcaccaggcgccttgaaattccagatgatgacaccaaggccctccagcggtgcatactgcgcagacttttagccacgctcaacgcccaccctctggcttgtggcttcgaagaagataccagcattgtggacgccgccctaccccaccagaatagagcagctgtcatccgtcttgatattagacgatttttcgaatccacttccgccgaccgtgtccaaaattggtttatcgccatcgggtggcaacctggtgctgcggaggtgctgacacggttgacgacaaacgatgggcatctgccacagggtgcgccaacctctcctaggctcagcaacttgattaattcccccctggacgagggacttttgcggctggctaaacagtacggcggggcctacaccaggtacgctgatgacatcactctgagctttaatttcgaccggggacggaagctgagaggcatcatccaggctgctcgacgcatagtgaagtcctatggctacaccctccacggaggcaagaagcggaaagtgctaaggcgacatcaacgccagcaggtcctggggctggttgtcaacgagcaggtggccctgcccagatctaaacgccgttggctgagggccgtacggcataggatagaaaacggtggcgaggcttcacttactgcagctcagctcaaaggttgggagtctttttgctcaatggtacaggaacagagagatgagggatga

SEQ ID NO: 13983 - RNA, 990 nt, synthetic construct
  source 1..990: mol_type = other RNA
atgttttccgtgcccgtgttgatcggattggctattagtgccgctgccgtcgttctatttggtttagttgcagcaacacgtcgccgggctgcccatggacatgatcgtggcacaccccaccctttaccacccgagcggggaaggtcttccccactacctcagtatgatctgtctgagctgtcccggagattgggcgtaagccgggccgtactcgaacgcttcgagacaggttataggatagccgagatcccaaagcccagggggggggttcgcagactggagatccccaatgaggaaacgaaaaagttacaacgaaccatactgcgaaggttgcttacagcgcttgacgtgcaccctttcgcctgcggtttcgagcctggcacatcaatcgttgatgctgccaccccgcacgaagggagacttgtcgtggtgaaaatggatattcgccggttttttgaatcgaccaccgctgcacggatcctggaatacttccagagaattgggtgggacgccgcttctgcggaggtactgcaaaggctgacgacttataacggacatctccctcaaggggcaccaacctcccctaagctgagcaacctggtcaacgctccgctggacgaagcacttctccgtctggcccggcgacacaatggagcatatagccgctacgcagacgatatcactatgagcttcgatatcagaaggggcagagtggtcagaggactcactcaggtggtcagacggattctgaaatcatacggctacaccatgcacggcggggccaagctgaaaattctgaggcagaaccaacgccagcaggtgctaggcctcgtggtgaatgagaaaactgcgcttccccgcaagactagaaggtggctccgagccgttagacatcacgctcgcgtgggtaggccagtctcactgagtaagcagcagctcgacggctgggaaagttttttgaagatggtggaaacccagagggacgagtga

SEQ ID NO: 13984 - RNA, 1029 nt, synthetic construct
  source 1..1029: mol_type = other RNA
atgctgaccattcctgtgttaataggcatcgccgtggtgggcgggctggcaattcttattggcatgattgtgggaacaaggcagcagcatcgctcagacgatgatgcctccgcgccaccagctggcaataggcctgctacagaatctccttctgggaatgtgccccagcgcgacacctctactgcgtccctaaccctgacagatttgagtgctcgcatcggcatctcagtggacgatctccaaaatcaccagccggtgtaccgagaggtccgcatcagcaagcctcatggaggagtcagatgtctggagatccccgacgatcggacaaaggaactccagagaacactcttgcatcgtctgtttgcaggaatccgggcccacaactgcgcctgcggtttcgaagccggtacctccatagttaatgccgctgtaccccacgtcaggaagagggtaattgtcaagctggacgtacgtcgctttttcgagagcactaccgcaaaaagagtctccgcttggtttaggagcatagggtgggacgatgaggccactgctgttctgacgcagctcactacgcacaacggccaccttccacaaggtgcaccgaccagcccaagactgagtaacctggtgaacgctcccttggacgagggactgctgaagcttgccacccatcacggaggggactacactagatatgcagatgacattacaatgtccttccacatcaggagcggtcgccggatcagaggaataatccaggccacccgcaggattcttagaagttacgggtataaactgcatgggggcagaaaacagcagatcctgcgacgacaccaacggcagcaagttctcgggttggtggttaacgaccaggccgcacttccacgacatacgaggaggcggttacgggccattcgacatcggacctcgcagggcattgctcctactctcactcccgcacagctagaaggctgggaagcgttccgtaccatggtggagacacaacggcagccctcatctgatcactga

SEQ ID NO: 13985 - RNA, 1023 nt, synthetic construct
  source 1..1023: mol_type = other RNA
atgtttactgtgccggttctgattggcatcgccgtggccggactgatagccattctgattggaattatcctcggctccagaaaaccctctcctgagcagacagctgagagacaggacgagacagtgtcatctacggatagtgcttctaagtcatccaccagccccgccgctccaccacttaaggctgtgagtggggggctggagatacgagatctggaggaaagaactggcttgagcgccgatgagctccggtcgttgaaacctgagtaccgggtcgtggaaattgccaagcatggggggggtaaaaggcgactggagatccctgacgaaaggaccaaggaaatccaggcaactgttctccgtcgcctgttttccgcgatcagaagtcactcagcagcatgcggcttcgaacgcgctactagcattgtcaacgccgccacgcctcatgtcggtagaagggtggtgattaagctggatatccggcggttcttccaatcaacaacagacgacagagtgcttgcatggtttcagtccgtcggttggtcccaggaagctgcgcagctgctgacccacttgactacatgggacgggcacctaccacaaggagcccccacctctccccgactctctaatctcatcaacgctccgctcgacgaggccttgctgcgattagcagagaaacacaagggcgcctataccaggtatgctgacgacataacctttagcttcaacttcaggtccggaagacgagctagagggatcatccaggcagcgcggcggattctgaggagctttggctacgcaatgcacggaggtcgcaaactgaaagtgctgaggaagaatcagcgccaatcggtattaggactagtcgtaaatgatcgcatagccttaccaagacataagcgccggtggcttcgcgccgttcgtcataggcgggaccagaccggccagtgtagccttagcgatcagcagctccaaggctgggaaagtcttcaacagatgatcgaaaaccagcgtgattga

SEQ ID NO: 13986 - RNA, 942 nt, synthetic construct
  source 1..942: mol_type = other RNA
atggcgtggatcatcgccgcagctgtcgctatggcaattgctgtcgctttcgttttgctaaagagtacccaggacagcaaatcgaccccaccccgtcggaagccagaaccgttcaccctggcggaccttctggagcggcttcagctgacagaagaagatgcccgccaattagaatccccccagtggaggaaagcctttatacccaaatcttccggaggaacgcgattgcttgagatcccagatgatgtgacactggccctgcagagaaggatcctccacaggctgctgtccgggctgaagtctcaccctgctgcgatcggttttgagaatggcaagtcaatcgttgacgctgcccgccctcactccgggaaacaattcgtgatcaggatagacattgaacgcttttttgaatctacaccggtgacacgggtagaagagtactttcggtttatcggctggactgacgacgccatccgcctgcttactactattaccacttgcgagggccacttaccccaaggtgccgcaacgagtcctagactcagcaatctagtcaacattcgaatggaccacgccctgcagaacgtagcagagagattccacggccattacacacgatatgccgacgatataaccttctcattccatttccgcagtgggaggaaggctaggggcattgtgcaagtcattagacgtatcctccggcaaagcggttatcgtatgaacagcgagaaaacccgaatactgcgggcacatcagcagcagcaggtgatgggactcgtggtcaatgagaaggtggccattcctagatcaagacgcagacagttgagggctgccaggcatcgggttagacagggaaagcccgcaacctttagcccagaacagctccaggggtggactgccttcgagaaaatggtggaggatcaggcatctattgattga

SEQ ID NO: 13987 - RNA, 921 nt, synthetic construct
  source 1..921: mol_type = other RNA
atgaactcgctgatgattgttgtcgcattcatcgtgtcccttgttgtcgtggccacggggttacttgtacggcgcataattaggaatctgagaaacaggtttacactcgctgatcttgtgaatagacttggtatgacagccgaagaatggagccaactcaaaccacccacttaccgtaccgccatgatacctaaacgcaatgggggacagcggatgctggagattcccgaccctgacaccatggttctgcagcgcagaatcttgagacgggtgttaaagcgtctccgaagtcaccgggccgctataggcttcgaaagtggtaaatccattgtccacgccgcttctccacacatcggccaggccgtggtagtgagggtggacatcgagaactttttccagaccactacagaacgacgagtgggcgagtggtttagggcgatcggatggaaccaggaggctaccgagttcctattgatgatcctcacacataatgggcatctgccgcaaggtgccccaactagccctcgactgagcaacctcgtcaatgcacgcctggatgcaggactcaatcgcatcgctcaatcctacggaggagcctatacgcgctatgccgacgatattacttttagctttcccgtggatcagccaagacagattagggcactgctgcaaatggtgggcaggtatctgaaacaggccggttaccagatgaagaactccaagacaagaattttgagggctcacgcaaggcagtctgttctggggctgacagtaaaccagaaggtcgcgctacctcggtctatgagacggagacttcgtgctatccggcatcagcagtcacaaggcaagcccaccactatgaccgctgcggaattgcacggctggaccgcattcgagcagatgatcgcctcacagaagtga

SEQ ID NO: 13988 - RNA, 909 nt, synthetic construct
  source 1..909: mol_type = other RNA
atggcatacgttattgctggcattgtagtcgtcatcgcagctgcaggacttgcagccgctatgcgctttcggaaacctcggcgcagctatactctcgggaacctcatcgatttcctagagttgactcccgacgatgcccgagttctcaagcagcctagttacagctcacaccggatccctaagcgcagcgggggatacagactgctggaagtgccagatgagcagacgaagatgttacagaggagactcctcagaagagtgctgtcaaagctgtccgctcacccggcggctgtgggtttcgaaaccgccaaatcgattgtggacgcagcgcggccacataccagcaaaggggtggttattcgcatcgacattactgacttttttcagtccactacgaccgagagggtcgccgcctggtttcgtggtatcggctgggacgccgactccgtagatttcctgacaaaattcgtgtgccacgacggtcatcttccccagggcgctccaacttctccccgtctgtctaacctgattaatgccggaatggatacagtactacaaaggatagccacagagcggggcggcacgtatacacgttatgctgatgacatcaccatcagtttccgacggttgtctggacgacgagccaggggggttgtgcagcatgtgcgcagaacactgaccgcttttggctacagggtcaatactagaaaaacccggatccttaggaaccaccaacagcagacagtgacagggctggtcgttaatcgcaccatatccatccctagaaagcaacgccgaaagctgagagccattaggcacaggatagccaacggacaacccgcgaccatgaccactgatcagttggcaggctgggacgcattcttagccatggtggaacagcagcggtga

SEQ ID NO: 13989 - RNA, 1191 nt, synthetic construct
  source 1..1191: mol_type = other RNA
atgaacgacggcgctgcctatggccggatggatcgccacgaagtggagccagcccccatacggccatactcagcttggcgggacctgatagcgctgctgctgaccggatgtgggtgtttcagtattttgttcgtactgggtttgaccgccgcaatgtttggtccgcctcttgcccaacgtatcgccccctggctgaccgtacctatcctgttcgctattggaatcaatctcgcccagtggtattttttcaagcgtctcaagcgtgtggacagatactccttattccgagcgaaacacaggatccgcgcagcgagaggcaagggcatggatattgaggagcttgcccgccgatgtgggctcactactcaccttctgcagaaccacgagcccaagtatcgggaggctgagatccccaagagatcaggcggcgtgcgtcggctgcacattcctgacccagctaccatggatctgcagaggacgctcctgcgcaaagtgctcgccaaattgcatgccgatcccgcagcgtgcgggttcgagaaaggaaagggcatcgtggatcacgcagctcctcacgtcgggcgagctgtcgtgataacatgcgacctaaaagacttttttcccagcgtgacagctaagtccgtcgactactattttcggagaatcggctggaatgcagaagccgccgccttgttgactcgcttgacgacccatgccggagaaggcggagaacctgggctgccacagggagctcccacatctccgcgccttagcaatcttctcatgcatggtgttgattacgctctcgccaaatctgccgccagacgaggctttaggtatactagatacgcagacgatcttgcattcagttccgccgaagacgatagccaggccgttcgcgaactgctccagcagattgatagggtggttaaaagagctgggttccggttaaaccctcgaaagacacggattttaaggcagcatcaaaggcagatgatctgcggcctggtcgtgaacgaccggctgaatctgccgaggaaggttagaagggagctaagggcagcactccaccgccgcagaaccggtatgcatgctacatacaccgacgagcaactagccggttgggcaggggtactgactatggtcgcaaggggaccaagagcggaacctggggtgccacggggtgttggatga

SEQ ID NO: 13990 - RNA, 1155 nt, synthetic construct
  source 1..1155: mol_type = other RNA
atggtgagctctgacactccccctcctgatagcaatgcgtccggccttggctgtgggggaatcgtgtggtccgcactcgcagccgtgttactgctgacgggcctcacagcggttgcagttcttgccgtcagagccttcggggctctggttgctgcccttggagccagtgcactgattgccataggtctaaacttcgcccaatggtactttcttaaaaggctgaaacgcgtggaccggtatagtctcttccgtttggggcatcgatggcgggcttggcgcggtaagggcttcgacatcgaggagttagcacgacgctgcggacttacagcgcaccggctgcaaaaccatcagcccagctaccacactgccacaatccctaagccctctggcggagagcgcaccctgaccataccagatccagccaccatggatctgcagagaactttactgaggagagtgctcgcccgattgcatgccgatccagccgcatgcgggttcgaacggggcaaaggaattgttgatcacgctgctccacatgtagggagggcggtggtcgccacctgcgatttgaaagacttttttccgtcagttacggcaaagtcaatcgattactatttccggagggtgggttggaatgctgaggccgcggcactgttgactagactcaccacatccgaaggcggactgccgcaaggtgctcctaccagccctcgtctctccaatcttctcatgcacggcgtggattatgccctagccaaggccgctggacgcagaggattccgttataccaggtacgccgacgacctggcattttcttcagccgaagatgacggccaggctgtcagagacttgctgagacgcgtcgaggccgtagtaagacgtggcgggtttgaactgaacagcaagaaaacccgagtgctgcgccgccatcagaggcagatgatctgtggcctcgtggtcaacgaccggttgaatctgcccaggaagattcggcgggagctccgagctgcactacacagacggagggtgggcagggaagcaacatacacagctcagcagctggctggatgggcaggggtgctgactatggtcgcgaggggtcccagagcttttcacggggagactccccctgacagtgccccatcttcggcttga

SEQ ID NO: 13991 - RNA, 1725 nt, synthetic construct
  source 1..1725: mol_type = other RNA
atgaacgatgggataattctagcacttgacggcggggaggccctgtgctttatcagcctggttatcttcatgattgtgttcttcgtggctgtgatacagttcttcaacaagctgaagatcctcgtgcccgacggccagcgcagtatttcaaaggctgagtatttggagcgaaagcgtaaggaagccatcaccaaatatggtaaaccatctgacaagtcacggatttatagactggttcctgagctggagaagttagacccacaatgggatcccagttatgagattgtcagaataccgaagaggagcggaggggtacgggagttgcagataccagatgaacttactaagaaaatccaatacgctctgtaccacaaactcttttcctactacatcgttcaccccgctgcgtgcggcttcgtcaagggtaaatcaattgttgacaacgcacgccagcacgtgggccaggaggtaatcgtgaaacttgatattcgggaattctttcccaatacgaaaaagatgcgcattaacagatactttgtaaccacagggtggaccccagacgctgccgatctcctaaccaagctggtgtgttacgagcaaggacttccgcagggcgcacccacatcaccagtgctgagtaatatcgtgaacaagtctatggacgacaggctgttctctctctctcagagcttcaatgcaaattatactaggtacgcggatgacatcaccttttcaatggagaagtacaacagagagttggtccatgcgttactgcaacgcgtgggcgtgattctccggatatacggatataatctgaaccggaagaaaaaacggattatcaggaggcaccggcgacaggaagtcactggactcgtcgtgaattccaaggtaaacttgagtagaaagagacggaggtggctgcgaagcatccaacaccgcatcaaaaccggtcagaagcttacagtcacaatggccgaatacaggggatggatctcactgctgaacatggttgaccccgagtctaacctgatccatcttcataagcagctcgttaagactgatgcccctgtgttgacgcctatgagcgatcctaatgacaatagtccaacagcagaactccagggttccgatgtcgatcgctcttcccgcgatgagaacaaaacccgtgtgtcctcggaaatgctggatgacaatgccagcgaattacgaacggtggacgaagacaaccctaccagaccatcggggtcccaggacgagacacatactgctgatacatccagtactagggctcccctcaataatgaccagcacgaggaacagtctgagctacccgagctccagtcgtccccggataacagcggggtctttcatgaagaccgacttgaagataaggtgcaggccttgaaagtagccaaaccttacagcactgaagccaaatcactcatcagcgaattcaccaaatcctcttatactatacagctgcagctggagagtagcaaaagaactttctcctttaggctgcctgaaggctatcaaaagggaagaacggtgacaggatccctgtctgatgggaccgaggtggaattgtattttcacgacagccttgctgagacagtcgagaatgccgagtttcctttaaagagcgaggtgacaattgaagttattcaatggaacgcaacctttaaacgtgttgaggccatcgtcaccggcggcctgttccactga

SEQ ID NO: 13992 - RNA, 1098 nt, synthetic construct
  source 1..1098: mol_type = other RNA
atgcagaacagtaacatgttagtcgcggatggagccggagccgcaatctgtttcggcatcctccttctggttctggccttcatagcctgcgtacggttcttaaatggccatgccaaaaatgtgatacaggacaaggtggtcaatttggatggctttaaaaggctgtccagagttcagaaagctctacttgcccaacgcaagcgcgaggctgccccagaagcatacggttcagtttctgggaccagcaggatctataagctggtcccagagctcgagggtctagggagcgagtggaccccttcgtaccaggtagctcggattccgaagaggagtggaggcttccgagaattgcaaattcccgacagccaaacgaagaaaatccagctggctctgtatcacaaactgttcgcaaactatgagactcacccctccgtctgcgggtttgtgaagggcagatccatcgtggacaacgctagaccacatgtgggacacgaggtggttatcaaactcgacatcaaggaattttttcctaacacataccggataagggttaatcgctacttttctgaaacagggtgggatccggcaggcgccgaccttttgactaagctcgtgtgttatggcatgggactgccccagggtgcccctacttcacccgtgatttctaacatcgtgaacaaggcgatggatattcgactctttgctcttgcagaaaagttcaatgccaattacacacgctatgctgacgacatcaccttcagcctgaaatcctatgaccgcaatgtcgtgcacaggttacttcagcacaccggagtgatcctgcgggattacaagtacacactgaacaagaaaaagaagcgaatcattaggtatcatagacgccagcaagtgacggggctggtagttaatgataaggtatccttgcctcggagacgtcggagatgggtccgtgcaatccagcacagactcaaaaccggcaaagatactaccgtgagcttcagtgagtaccaggggtggatttctctgattaaaatggtggacccagcctcacccctgctcatagtccatcaggagattattcagaacaggatggcgtga

SEQ ID NO: 13993 - RNA, 1734 nt, synthetic construct
  source 1..1734: mol_type = other RNA
atgcccgcctcggggactgaaacaaatctcattatctggggcttagctgccaccatcgctgccgggtttatactgcttgcgcgttatcgccaacatgtgagcgcaaacgatagaaagcgtggttctaattctgcaggcagccggaaacccagccggtatggacgccaaaacagttacggtaagtccgctcagggcccactgtccgatgtcgacagattgtatagacttatacccgggatccaggaactagtgaaatctggagggacacagtatacaaattcacgcattcctaagcggagtgggggtttccgggacctggacgtgccgaatcaggctacaaagaaggtgcaacacgccttataccacaagttatttagcaaatacaggatccacgagagtgcgtgtggatttgtgaaaggccgctctattgtgcagaatgccctcccacacctgaggcatgaagtagtggtgaaactggatatacgagagttcttccctaatacaagcaggttgcgcattaaccggtacttcaggtccaccggctggacatcaaaggcagcagacttgctcactagtattgtttgctataagcagggcctaccgcaaggagcacctacctcccctgttataagcaacatcgtgaacaagacaatggattggcggtttgctgcattggccgatgcatttggggcccagtacacccgctacgcagacgatataaccttctcccttaagtcttatgatagggggaaagttcatagactcattcaaaacgccggaatggtatgcaggagctacggttacaagttaaacaacaagaaaaagcggatcatcagatctcaccggcgacaggaagtcacgggactcgtcgtgaatgagaagattaacctcccacgatcaaggcgtaggtggctgagagcaatccagcacaggctgagaaacggcctcgaaacgactgtcactaattcagagtacgagggctggatgtcactgctgaagatggttagcccggaatctcccctgctggaatcccaccagcagcttatcctggaaggcatcctgcatcgaaagaaccagagtacactcactgaggagaaaaagcacgcggactcccagcttgagagcgaaacggctcaaagtggtgccgacgtcgtcaccaccgtggagatccgttccgagggctcagatgaccaagccggtaatacctcacccacgtctttggataccaattccgagccagaggccgacgggtcgattcagcttgctgccgataaaagggagcctcagggtgggagtaaaacccatgacacaattgccaatggagttgagtcacaggccgaaagcgatggagtacccgactcgaaaagcgatctgttttatgaagaccgcctgattgatttcgtgcaaagactgaaaaacgcgaagccatactctgccgaggcgcgagaaatcgagaatgactttgccggcgcaaagtacgctaccgtagtggagctggagtcctacaaacggacattctccttcaagctcccagccggctatcagaaggggcgcactgtgagtggaagaatttctgacggcaccgctatccagctatatttcgccgaccagttgagcgatcccattgaagccgctgctttcccttttaaaggggaggttagcatcgaggtcatacagtggaactccactttcaaaagaatcgaagcactggctactggaggcatgtttgactga

SEQ ID NO: 13994 - RNA, 1683 nt, synthetic construct
  source 1..1683: mol_type = other RNA
atgatcgtacgaggaatcgatgttggcttgtgcgcctgcctcttttctattgctttcactattgtcatcgtccttggtataaagcggctcacctcgccaaagcggaacaggatgaaaaagacaggccagtctaaacgaaggagatcaccttaccgtcccgctaaggcaaaccagactagttcccctaaacatccaaaaagcgatgtggaccgcgtcttcagactcatccccgaatttgagaaactggacccagagtggcgcccttcctacagcatcactcacataccgaagcggagtggcgggaccagacaactgcaagtcccgtgccagaccactcgacagatccaggtggctctatataggaaactgttcgctcggtatgaaactcaccctaaggcgtgtggatttatttccgggaagagtatcgtggataatgctaaaccccacgtaggcaacgatgttatagtgaagcttgacatcaaagaattcttcccatctacatcccgcagacggatccttaattactttcgcactactgggtggaccaacaaggcgagcattttgttgacacagctgttgtgttatgagcaggggcttcctcaaggagcacccaccagccccgtgatttcaaatatcgtaaacaaatccatggaccgacgacttgactccctggccaatgagttcaatgcctcctacacgagatacgccgacgatataaccttcagcatggctgtgtatcacagagataaggttcatgcactcctgcaaagcaccggggcaattctgcggacatatggttacaagctgaacaacaagaagaagaggattatccggggtcacagacgccaggaagttacaggcctcgtggtgaatgacgtcgtgaacttacccagaagcaggaggcgctggctgcgttctgtacagcatcgcatctctaccgggatgcacacctcaatcaccccatcgcagtaccagggatggatcagtttgctgcagatggtgagtcccgactcacccattattgcacggcataaagagctgttggccgccggtatgctgaagtcaaacggtaagtcagggatcaaggaaacaggcggccacgaagaatctgtcttagatgagacaaccgatagaatttccgcagccaattctaattcgcctcagacagacattgccgactctctcaatgagtctgagtcaacgagcatagtgtccagcgacgggggcagcgaatcagagagcctgagcgaaacacctctgaaagaggttacacaggagctggagctagaaagtcaacatgcagtcgggggaagtgctgatgagttatttcacgaaacgaggctgacggataaaatatacgcccttaaagaggttcgtccttatagcgaccaggcgaaacaactgcaggaggagtttaagggctcccagcatactacctccgtgatcctcgagagtcttaagaggtccttcagcttcaagctgccagaaggctaccaaaaaggaaggactctgtctggcttactaccggatggcaccgagatcgagctctatactaccgacatttctgccgaactgtttgatcaggtggacctgccaatccagggagatgccgtgattgaagtcatacagtggaacaacacatttaagcgcgtggaggctattctcctcgacggattgatgtga

SEQ ID NO: 13995 - RNA, 1722 nt, synthetic construct
  source 1..1722: mol_type = other RNA
atggtgtcttctcctaataccgtgagtggggtagataggctgtcggagatgttgggcatgagcgtgcaggagctggaaaatttctctccgcagtataagcatgccgtgataaaaaaaagaagcgggggcaaccgactgctccagatgccaaatgacgagacaaaacgagtgcaaaggctgctgctggataaattgatcggtaggtacaaaacccacgctagctgttgcggcttctcaaaggggctttccattatcgacaacgctcgtccccacgtgggtcgcgagacagtcattaagctagacatccaggatttcttcccaaataccaccgtcgacaggatccatgaattcttctgtaaaacgggatggacggatgatgccgcagacgtgttgactaagctcgtcgtttttgacgagggactgcctcaaggagcccccacatcacccgcagtgagcaatgttgtcaattgttttatggatctgaggttggacgcactcgcgaaaaagtacgggatgacctacacaaggtatgctgatgacttaactttctccagcgagatatattccaggcgcgacgtccataagattttacgcatcacgggcgttatcttgaagtcctgcggatattctctaaacaagaagaagaagcggattatcagaaaacacaggagacagagtgtgacagggatcgttgtaaatgagcggctgaatatcgcccggcctacacgcagactcctaagatcggtgcaccaccgtcttgaaagcggtggaaattctaccctctccgagaatgaatttaacggctggattagttacctgcacatggtaaaccccaaggatcccttggtcacttccgtgttcggcgagagtgacagcgataaatctaagcgcagaagaagccctaagtacgtcaaacagaacgcctcacagtctgcgtcatcaaattccggccagttcaaccctattgcggatatttctttcaggccaatcaatcggggtgacgttagtaccttgtcccagctgggcctgtcacccaccagcaacgcggtgactcccagcgagtattttagcgcacaactgttttacaacttcggtaaaaacgttaatgtcgtagcccgtcggagaaacctcaaacgcaagacagtgtggaagcatttagctcacgcagtggaacactccctggtcgcctgtcatgatctcatcagtaaggaagacttaagccagcttctatctcagctcaaacagcacagcccaactgccatcccttcagtcggggatgcctataggatgtgcatgggccaaattgactacggacgaattagagttggccttgccgaatgccgacgcagaaagcggaagctccaatccgaccgggggaacgaaattatcacgaaactgaacaacttttccagtacacgcgaggaggccgtactgaaaaccgtttttgggaagcggctcaattgttcgtgcgctgtggaaagtgtgtctataactgcaaacgctgaccttccaccggactacacagagggtcggacagtgcatgctactcttccggaggacccatcaataagcctcaccctgtttacccctgctgcccagaatgataacgtggactcactgtcctctgctcaaaacgtgtttgtgcgtggagcaatccagggcatggatgatgcctccggatgcatagaactgctgactgaagagcttcagctgcgaacctga

SEQ ID NO: 13996 - RNA, 1677 nt, synthetic construct
  source 1..1677: mol_type = other RNA
atgagcccactgtttgtcgcagacaaccctaggcggatcgcaggtagtctgctaatcatctgtcacgccacagcgattattgactccgggggcggagagtatatggacgaatttctggaagcactgttctctctgcagattgtgtcacttataacggtactgctgatcatactgttctttttccgcaaaaagaactccgacgcaaccagagggagttatcgcacacagcgatcccgtaagacacgcgagcagagaaggcggaagttgaccgttcgggacctggggatgaagctggagatgtccaaatcagaactggtgcgacataacgtgcagtacgagacaacaactatccctaagcggagtggtggcaagcggatcctgcacgtccctgacagagccagcaaacacctccagaggactctgcttaaacaattaatagagagactgccgatccatgatgatgttcacggtttccgaaaaggacggagcatcgtcgataacgccgctgaacatattggccaagaggtgattgtcaagctggacattgtcgatttcttccctgccaccaattctgaaagagttgaaagcgcttttaaaggcgccggctttgataagtcttccgctaagttgctcacacgcctcacctgctatgaaggtgggttgccccaaggagcgcccacctctcctgctctaagcaactacgtgaataaaaacatggatgtgaagctggcggatgccgctttgaggcgatcagccaggtatacccggtatgcagatgacattactttctcatttccagagtattccagggagaagatacacgagctactgatctcaacaggcaagattttgcagtattacgggtaccgcctgaacgaccgtaaaaagcggattattagacagcaccgccagcagcttgtgacgggattagtggtgaacgaaagggtgaacctgccccggaagacacgaagatggctcagggctgttaaacataggatggaaactgggggggaagcaactctaacagcagctgagttccgaggctggctgtcacttttaaaaatggtcgatccagcggcaccccttctgaacttcctagatgggctcaactcgcgtgaggagattatcgataagccgctgcccaaaaatggcgacctgaagaagttagtcggacggcaaagccagaatgtcaaaaccgtggagatccccgtgactacccctggatccgatatcgccgacgacgctttgaccgacaatgcccagcaggaaacccttcgcgattcggaggtcgtgaatgcacgcaatgcaaatactggagtagagaatgtatctctcgtagcgatggtggaggccctcaaccagaccgacaactacacggagagcaggaaaactgccgaactccagctggccggcaaagagtacttgcttgagatctccgccaccagcgttggcagaacttttagttttagcctcccagtagcctaccagaatggccaaacgctcagagctacactgcgcaatgaaggactcgctctcgaattatactgcgacgagcaggtgggttctgaactggcctctatacagttcccaaaaaatttgaaggtccttgttagggttgtgcagtggaacgctatctttaagcgtatcgaggccgtggtgctccaagccagtagatga

SEQ ID NO: 13997 - RNA, 966 nt, synthetic construct
  source 1..966: mol_type = other RNA
atgagtcgactgcagagggctaatgcagaccgtaaacgggaaaggccgaagctcaccctggctgacttagtggctagactagggatgtcaaaggcggatctggtagagcacgaagtccaataccgcgcaacaactataccaaaacggtccgggggaaagcgagtgttgcacgttccagataggttgacaaaaaccctccagagaaagctgctctatcagatcattggccgacttcccctccacgacaacgtgcatggtttccgaaagggacattccattgtggacaatgccgcaaatcacacgggccaggaggtgatcctgaaactggacattgtggattttttcccctcaacttcatccaagcgcatcgcgggggcatttgaaggggcaggcttcgataagagcacagccgtcctgctcaccgggttcacttgctgggagggaggcctgcctcaaggagcacctacaagtccagccctgtctaattacgtgaacaagaatatggacaagaaacttgctgccgctgcttctggcagaggtgccagatacacccggtatgccgatgacatcaccttcagttttcagaggtactcgcgtgacaacattcaccagctgctgatatctactggaaaaatcctgcagtattatggttacaggctaaacaacaagaagaaacgcatcattaggcggcacagacagcaactggtaacaggactggttgtcaatgatcgggtcaacttgcctagaaagacccgcagatggcttcgttccgttaaacatcgcatggaaactggcggccaagccacgttaagctcagccgagtttcatgggtggctcgccttacttcggatggtcgatcccgactctgctttgctcgagtttgtggacgttcagaatgcgaacaaaaagaatatggccaggagccgcatgaaagattccaacagccagagcgtggtggccggctga

SEQ ID NO: 13998 - RNA, 1554 nt, synthetic construct
  source 1..1554: mol_type = other RNA
atgctggactccataggcgaggtactgttcagtcccttggtggtgaccgccatcatcgtcctcgtgttgatcctccgatgtttcaaagggcgtggtggacggagggaacttagtattggcgacctggccgataggttgaagatgtccaaaaccaatcttgtgcaacacgacgcccagtatcggaccgcaacaattccaaagagatccggcggcaagcgaattctccacgtgccagatgacgccacaaaacaactacagagaaagctgctgcagcaactcatcgaaaggctagctatccacgattgcgtgcacggatttcgcaagggccactctattgtagacaacgccgcggagcacactggtcaggccgtgattgtaaaactggacatcatcgatttcttcccttccacgaactctgaccgggttaagaatgctttcagaggggctggatttaataaaagcgctgccacccttcttactggattgacatgtcatgagggagggctgccgcaaggagctccatcgtctcctgcactgagcaactacgtgaacaagaatatggacgagaagctcgctgaagcagcaaataaaaggggagccgtgtacacacgctatgccgatgatatcaccttttcgtttgtgacttattctcgccacaatattcataacctcctgatagccaccggaaagattctaagacattacgggtatcgtctgaacaacaaaaagaagcggataatcaggcagcaccgtcagcagctggttacaggcctggtggtgaacgaaagggtgaacctgcctaggaagaccaggcgatggctgagagcagttaagcatcggatggagactgggggtgaagctacactcactaattcagagttccgaggttggctcagcctgctcaagatggtcgatggggactctcccctcctgacttttcttgacagccccaaacctaaggctgaagaaagcgtcacgagaacccgccatattggcgacaatatctccgatagcgacggccattcatcactatccgattcagactctagtgtggtccatcagggtaaatctgccaccgaaggggaatccttgccaaccaatacgccaccggagacaccccccgttgtagcttcaggcactatactgcctactgacggcagacggcagttcttacgattagcgcggctgggcgccgatgggaatttagcactgctgcagttagtcgaggccttgaaccaaaccgaaaaatactccaccaaccgcaacgaggcggagaaagacctggttggctcagagtacttaatcgatattagcgtcagctctatcgggcggacgttcagcttcagtctccccgaagattatcaggatggtcagaccctgaaaggaacactgcgcgacggaggcttgtccctggagttgtactgcgataaacttgtgggcagcgagcttgcggggcttagttttcctacacgcctgaaggtcctcataagagtcgtgcagtggaatagtatttttaagaggctcgaggcaatcgttctacacacaactctgtga

SEQ ID NO: 13999 - RNA, 987 nt, synthetic construct
  source 1..987: mol_type = other RNA
atggttaggaggcccggcggtctggaactggcagagaaccagctggaagtgacagagcctgctaggggcgtacgtcatcttcagggtggtcgcggcacagggagatgctcttttctgtcaactagcacgcgattcgctgtcggtctattcgattggtttcgcaaacgcaaggatgaaggactcgatactggggaactggccagacgactaggcgtgtccgaaagcgatctcgactgtagtcctaggtacaacgtgcgaaccattcccaagaggaacggcggacggcgcaggatagctgaaccatctagagagttgaaacagctgcagagagttatactgcggcggctcctgagccgtcttaaggcacacccggcagcacacggctttgagaaagggagatccgccgtgacccatagcgccaaccactgtggcaagaaactgatcgtggtactggacatcgaagacttcttcagaaacaccaccgagcgccgagtgcgcgattactttaggtctatcggatggaatgagaaggcctcagagctactcacccgcctgaccacttttgaggggggacttccacaaggggccccaacatctcctcggctctcgaacttggttaattataccatggacctgaggttatccagattctgcgacatgcggagcattacatattccagatacgccgatgacttgtgcttctccactgatgacgaaagttggaccggccaactccttcgtactgtccctgagatcttgtcagacttcggctaccgcgtgaatcgggccaagacgcggttcttacgagcgcaccagcgacaactggtcacggggctggtcgtgaatgagaaagtcaatctccccaggtcaacacgccggtggcttagggctgtggaacatagaatgttattgggaggaactcccacaattagtgagcagcagtttcgggggtggctggcgtatcggcagatggttgagcgtagatga

SEQ ID NO: 14000 - RNA, 924 nt, synthetic construct
  source 1..924: mol_type = other RNA
atgtcgatcctagactgggtgtcagggctgttaggcacagggagctcaggtacaggcgattccagaaggaatgaggggaatgacctgcgggaactcgctagacggttaggtgtttccgttgaggaactgacctcaattcgacctgcctatagagagatccgggtgaagaagcgatctggtggcactcggttgctcttggaaccatcccctgagcttaagaagattcagaggtgcatcttgcataaacttctgaagaggctcagtagtcacgaatccgtccacggctttgagagcggccgctctatagtgacgaacgctcagcagcacgcaaataaagatctggtcatctgcgtcgacctgaaggactttttccagaagacacaggtgaggcgcattcgcgagtatttcacattcataggctggaacaccgacgccgccgacatgctgatgcatttgactgcctggaatggaggactgccccaaggtgcgccaaccagcccaaggcttgccaacctggtgaaccatgctctggatgcaagactagagggactggccaagcatcatggaggaacgtacacccgctacgcagacgaccttacatttagcttccccacccggaaggaactccccaaaaaagagactggaacttttctggagatggtgagccggattgtcaaagagaacgggtatagtatgcacggcaaagaaaagctgcgcgtgatgacctacgcgcgttgtcagtccgtaactgggctcgtagtgaaccagaaggttgatctgccgaggaggaccagaaaatggcttagagctgtggaacaccaccgggtcaccggcaaacctgcaacactctctgatgaacagttaaatgggtggcgaagtctccgtcaaatgatcatcgatcaaagacgcgagcgatctcgttga

SEQ ID NO: 14001 - RNA, 981 nt, synthetic construct
  source 1..981: mol_type = other RNA
atgggcttctgggactggctgcggcagttgctccaaggtcctggcccgcaggaacgtaagccagatctcacaccaccagtggacggaaaaaagctggaagaattggcgaagcggctggacttttcagtggatcagcttcatgcggtccaggtttcctatcggcaattctcgattcccaagagaagtgggaacggttttcggacaatttccgtgcccaaccccgagctgaaagaaatgcagaggaggatcctgagacgcctgctcgggaggctgcagactcaccctgcagcaatgggctttgagcccggccaaagcatcgctacgaatgcagcttaccacgtgggggctgacgtggtcgtcagaatggacataagagatttctttggagctaccgtgactaacagagtacgtgcgtacttctatggaattgactggggcaaggaagccaccgatgtcttagttcggctgtgtacctatgagcgcgggcttccccaaggtgccccaacatcacctaggctcagtaatctcgttaacttcgaactagatgcacgattggacggttacgcccagaagatcggagcccgctacaccaggtacgccgacgatatcacattttctttcaattttgccgagatcaagcagacgctaaccggccagaattccaaaatacttgagcacataaaggataagagcaaaagctcttacgtaatccatcagactatcaggatgaccaaacgcattctgttcgagtacggctatcagatccacacaaaacgcaagcttaacattagacgaaagcaccagtgccagaaagtgaccggactggttgtgaaccataaagtcgccctgccgagaaagactcgaaggcgtttgcgggccgtggagcatcacttagctaatgaccgccctgcaaccctgactcatgagcagctcgctgggtggaaagccttacagtatatgattgagacacaaactaagtga

SEQ ID NO: 14002 - RNA, 981 nt, synthetic construct
  source 1..981: mol_type = other RNA
atgggcttttttgattttctgaagaggctgttctccagcgaaccggagcgaagagcaccccggttagtagcccctgaaccagggctaggccctgatgaactcgctaggcggctgggactgtccgtgcagcaactggagagtaccccttgtgactaccacgagttcgctattcgcaagcgctcaggaggtactaggcagattaccgccccaaatagacagctgaagactgtccagcgcaaaatcctcaagcgcctcctcggcagactctgttgccacccttgtgctacggggttcgaaaaacggcactcaatcgtgaccaatgctgccgtgcatgttggagcagacgccgttctgagaatggatatgatcgccttttttcgaatgacaactgcagagaggatccgtggctacttctatgggatcggatggggcaaggaggcgacagacctactcataaggctgtgcacacacaacggtgcgcttccccaaggcgccccaacttctccgcgtctgtccaacttggtcaacattgaaatggatacccggctggcatgctgggcgcgaaaaattggtgccgcatacacacgctatgcggatgacgttactttcagttttccagacttagatgcttctgctcctgggcccgccttcgaccaaaaccccaagaccctggaaagcattagacgggatgaaggcgacgccttgatcaccagcacaataagaatgaccaaaaaagtcctgggggagtatgggtacgagcttcacaataagcggaaactgaacatacgaaggcggcatcaacagcagcgagtgtgcggccttgtggtgaatgagaaggtagcattgccccgcaggacacgtaggtggttaagagctgtgcgccatcaccatgccacgggaagacgggccacccttactgcacagcagttggctggatgggacgccctggagcatatgatcgctctccaggccgaggaatga

SEQ ID NO: 14003 - RNA, 981 nt, synthetic construct
  source 1..981: mol_type = other RNA
atgggcctgttcgatcgaataaagagtatgctgggcgggggagccaaagcctctgttaataccgacagatggaatttggatgaactcgcacgtaggctggacatcacccctgatgaacttcaaaacatcaagcccatctataacaagtttaccattccaaagcggtctggtggtaaaaggacaatcctcgctccagctcccgagcttaagcagctgcagcgccggatcctgagacggctgttagctcgcttgcgcacgcacccctgtgcaatgggattcgagaagggccgatcaatcgtgacgaacgcccgcccacatgttcaagccgatgtagtgatccggatggatatacgggacttttttgggaaaacttcggcacagagggtgaacgcgttttggcggtttattggatgggacaagccttgtgcagatatattgaccagactgtgcactcatgacggcgcgctacctcagggagcacccacatctccgagactttcaaacctcgtaaactatgggctggatgcccgactggaaaagtggggtcagcccatcggagctatatacacgcgatacgccgacgatatggtcttctccttctcaagagtgaccatttccaatatgccagcctttaagaattggtccagattctatgacagtccaactgaggccctagacgacttcctccgcaaagcagtcaccagcactattagggtgaccaaaaagattttgaaggattacggctacaaaattcaccatcacaagaaactgagcattaggagaaagcaccagtgccagaaagtgacaggcttagtcgttaatgaaaaaatcgctctgccgcgtcagacaaggcgctggcttagggccgtcgagcactatcatactgctgggaaacccagcactctcacacctcagcagctccaagggtggcgtgctctgcggaatatggtggagcaacagcctgccaccgacttcacatga

SEQ ID NO: 14004 - RNA, 5727 nt, synthetic construct
  source 1..5727: mol_type = other RNA
atgggaatcctggacctcctgtttcaaattggggacagacccgggcacctagacattagcgaattggctagacgcctcgacatgtctgtgaaggccctgagggaaacaccgctcgagtataaacgttttcggatcgctaagaggtctggtgggaagcggactattaaagctcccaaccccaacctgaaagccgtccaacggcgcatcctgagacggctgctcgcaaagctgactgcgcatccagccgcgaccggatttgagaggggagaatcgattgcgacaaatgctgttaggcacacaggatgtgaagccgtgctgcggctagatatcattgacttcttccataacaccacggttcagaggattcggcgctgtttccaccgcatcggttggaataggaatgctgccaatcttctggtcagattgtgcacccttgacggcggtcttccccagggagcacctacttctccgagactgtccaatctggtgaactatccaatagacattagactgaacgcttgggccgagaagaataatgtcaactattctcggtacgcagatgacattacgtttagtttcgagcgcgagacagaagacgatataggcaccgctattcgactgacccgcactgtgactaaggaatatggttaccgaattcacagagacagaaaactgtccatccggcgtaaacatcaaagacagatggttacaggactggtcgtgaatcagggagtggctctgcctcggaagactcgtagatggttacgcgcggtggagcataggttagataccgggcagaccgcttccctatcaaaggagcagttggctggatggagggcgcttgaaagaatgatcgatctacaagctggccgccgcgctaaaacacatcgtgatagccccactgccagacccccgaagaagagagctcctgagacggatgacatggttagagcccagctgcaactggcccgtgaacagctgctggatcttaccatgagaaacagacttttgaacttccaacgcaccaggaggacgaccattcggataatcgatgagctgccaggtcaattatgggagttgtttgtggagaagcagaagaaactggcatttctggctgcggaggaacatgagctctttcaggccgctggagatgacctgccaccgaccgatgagccaggcgaagaggagccggacgaagatgcaatcccaggcgatctcgcaaagcttttccatcagccccgtcccgaaaccgcacttgaggacggccagaccgaactgccagcacgctacaccgacctgttccttcagacagacctcagagacgaggacttacagatcaacctcctgcgtatcgaccagcagagccactccgctctggaagagcggggcgtcaacctcctgtttctcgcaatgggattcctggaatggcgtccggatgatgatgagccaaaaacccggcgagctcctttagtgctcgtccctgcgggtctggagagggcatcagcacggagaaggtttaagctgagggctcttgatgatgatccaatattaaacccgtgcctcgtgcaaaagctgcgagagatgggcattggcctccccgcagagcctcagagctgggtagatttcgatacagagacatttttgcgggacgtgggcaaggcagtagctgagatgccggggtggcaggtgcacgaggacgtctacctgggcttcttctccttcacaaagtatctgatgtatctggacttggatcccgctaactggcctgaagggcggagactcttggagaatcgaatattgcgcaccgtttgtggtgatgctgaatccattgaacagatgggatcttggcccgatgtggcatctgaagaccgggagcgggacccagccgaaacttaccaggttttgaacgccgattcttcacagcagaaggctatattagcagcccgagaggggcgcagtatcgtcattgaaggcccgcccggcacaggtaagagccagacaatcactaacatcatcgcagaatgtctggccgccgaaaaaagggtcctcttcgtgtccgaaaaaatggccgctctggaggtggtgaaacggcgcctcgatgcaaccggacttggggacttttgcttagaattgcactccactaaggctaatagaaggaacttggctaccgagcttgggagagtccttgacaagggacgaagaacagctagggacgagatgggagacggcgagaggctccgcttgctcaagcggagaattagcgctgttgcggccgcagtgcatgaccgacacgaccctttaggtatgagtccctacgaggccgtcggaaggttttccttactagccgacgttcctgattgtttctgtgacattcctggctggcaggactgggatcgaggccagctagaagaaatgaaggggaggctcgatcgtctggggaggcaggaacaaaatgtgggccctagagaagatcacccttggagaggcgtacggcggacacacgtgagctctcaagaccggagggatgccgagaggcattgcactcgcttggccggcatgctagcggatctgccacgcttcttaaaagcggtagccgacgatatccagacgccagtcccaggctccctggacgatgcctcaaaggctctggaggctgccaggcttgttgcggacagtcctggacccccccgtcgtcttctgcttgggagcgaatgggagggcgatagaccagatcgaaaagcattcctcggcctggccactgagtttttcgagggccaggattggatggctacgaggtaccgcgaaggcgctctcaacggagtcaactgggagggcatgcacagacgctgcctgagatattgggccagtcctctgagatggtttcgtcctcaatactggagtgaccgaggcctactaaagggctttcgagagtcttcgtatcgaccagactttgccgcccaggccgcggatctgaaaaggctggccgatctagcaaagctcaagatggagattgactcacgtcgcgaagatgggatccggtattttgacgaggcttggcaggggtctgcctctgcttggggcaggttgagcgcaatggccgattggttaacgagattcagaacactccacagggatggttggctcggtgacaaggctgtgacaaccgccagttacgctggtgaccacgcagcaacagccaagaaagccagagccctcggggagaaactcgatgcgtttcactctggactggatgagctcaatgggctcttggacctgagcgcagatgagatgttcgatgtgcccgttttgcaggtagatttcgacgtgatagagtcgagatttaaacggatggctgcagccggtgaagaactggtggtgtggacccagtatcaggaggccctccagcagtgtgaagattccccactgaaaagcttcctcgagtcagccatggaggatgatagacccatggattcctctgtgaggcctctggcaatcgagaaacagttccttcgcctgtggatcgaggattgttttgagcgccgagaagagctgcgccagttcaactgcggggatcatgaggccgccattctggattttgccaagctggacgttgactggatccggcaatcacggcaacgcctgcatggcaggctgagttcacgaaggccagacgggagaatgcaggcggcaccctccagccaaatgggaatcgtgcagagtgaagtgcgccgcaaacgtggaggccggccaataaggaaacttctggccgatgcagcagacgtgatccccagacttaagccctgctttatgatgtcccccctgtcggtggcccagttccttgacccagccggtatagacttcgacgtcgtgatcttcgacgaagcaagtcaggttgagcccgccgatgccttaggcgctattgcccgcggacgccaactgattctggtcggggatccaaaccaactccctcctacctcctttttccacagcgggcctgctcctcggtcatcagcagacgctgaggacgccgtcggactagtggatatggaatctatcttggatcggtgtgccgttgtcttgagcaactgccggctgcgctggcattatagaagtcggcacgagagtctgatcgccttcagcaatcgcgaattttacgactcgcggctagttgtgtttccgagttgccacaccggcgatgctgaactcggtttgaaaactatttttcaccctcaggaccggtacgggcgaggtaaaggccagaccaatagggagcaggcagcacgcgtgacggattttgtgttcgaacacgccaggaggagaagggacgtgtctctgggagtgggggccttctctagacgacagcagcaagctattctagacgaaatcgaaaagcggagaatcgaagataactccctcgaggcctttttcgacagaaatcgccccgagccattcttcgtcaaaaatttagagacaatccagggtgatgagcgtgacgtgatcctgctgtccgttggctatggacgaagcaggccagccgagcgccttagcatgaattttggacctctgaatcaggctggaggctggagacgactgaacgtgctcattactcgcgctcgcaggcagtgtgtggtcttttcatccattttaggcgaggacttcgacttgtcagcgacacaagcccggggggtacatgctttgaaaggctaccttgacttcgcccgtgacgggatgttgcccccaaccgtagatgaagccgaagaggactcatctgccctggagagggccatctataatgccctggtagccgcggggcatactgtatgccggcgagtagggtgcggcgcagatgcaatagatcttgccatcgaagatccactccggcccggaaggtacctgcttggcatcgagtgcgacggcgccaagtatagagacaccgttactgcccgcgacagagatcgactcaggcagcaggtgcttgagggatacggatggcgtatacacagggtatggagcgcagcttggttcctcagtcccaggaaggaaatggaaaggctgaccgccgtaattgccgctgccagagctggtactctccaggcacgatttctacctatcgcgtccgcagcgactcaggagattgacgatgagatggaccttatccccgccgacgacagcagtcctattcccgttaaagcatatcgccgataccggccaagacgtaggcggtcctctgaacggttttacacggacagcctgacagaactcgccgcccttgtgaccgaggtggtcgaggtcgaaggtccagtgcatgaggaccaggtcagccggaggatgctggacatctacagattttcccgagggggctctcgcatagacgagaagatttcaagcgccgtccgggttgctgtctacggtgggaagattaatcggcgaggagacttcttgtggcccgcggacatggaaacacctcctctgcggcgacgcgacgatgacgatatcagagatatcgacctgatctgtcacgccgagatacgtcgcgccctgcggttgttactggaaacacaatttggcatgtctcgcaacgacctgactacccaagctgcgaggctgttcgggttccaggtgagcggatcccggataagggacaggatcgggcaggcaatccagggcctcttggaaagcggtaaagtggcagagtcaggggcaattctcaatgtgagctcccaatga

SEQ ID NO: 14005 - RNA, 960 nt, synthetic construct
  source 1..960: mol_type = other RNA
atgggtttgttcgattggatcaagaggcttctgggtattgccccaaaaccaaaaaatatgttcgtggaggtggactttcggggcaggcctcagcgccaatctaccccagagaagcccctgggcgacttaatggaactaagcaggagactggccaaaccggtcactgacatgcaactgacgcccgtcagatatgacaagtttactattcccaagcgatccggcggacagcggcagattatggctccttgcccgaagctgaaggagatgcagtctcgaatccttcatagacttttggggggacttcgcgcccataggtccgcaatgggctttgaacgtgacagaagcatcgtgacaaacgctctgccccacgtgggtgctgccgtgatcgttagaatggatatacgggacttctttccttcgacagatgccgctagggtacacgcctatttccggggcatcggttgggataccgaagtggtggacctgctggtcaaactgacaaccctcgatggaggcttgccccaaggagcccctacctcaccccggttgagtaacttactcaactatctgatggacgcacgtctggacgggctcgccagatcacaagggggcgtgtacacacgctacgcggatgatatgactttcagttttcctacggataagggcaatcacaaaaccgctatagttagcgcgaccaaggatatcgttggggaatacggataccgactccacttgagacggaaactctccattcgtaggagccaccagcagcaactagtcactggactggtagtcaatgagaagccagcccttcctaggaagctgcgccgaaagctgcgcgcaattaggcatcggctggagacacaggggcaggcaactctcaccgaacagcagttagctgggtgggacgcactcacccagatgatcgagacacagcgcactccaaaaaacaaacagtga

SEQ ID NO: 14006 - RNA, 930 nt, synthetic construct
  source 1..930: mol_type = other RNA
atggggctaggcgatttttttcggcgactgttctcagtctccaacgacgaaatgttcgcgcaggatttattgccatctcagggctccagggatgtgagcagcaagggtaaattaggagtgaacgagctcgctcgtcgcctcggcatcagcgtcgagcagttacaggccgtcccgatcgcttattccgagtttacgatacccaaacgctccgggggcaaacggaccattcttgcccccagggacgagctaaaaagtctgcaaaggaagatcctgcgaagactgttgggacggcttcggtgtcattctgcagccacaggcttccaacgtgggcagtctattgtaaccaatgctagaccacatatcggcgctgcagtgctgttgaagatggacatcaaggaattctttcccagtacaactgccgaccgtttgaaaaagtacttcaagtacattgggtgggataagcaggcctgtaaactgctgctggagtggaccacccataaaggtgcacttccccagggagcacctacgtcgcctaggctttcaaatctcgtgaatttcgctatggacgctcgcctcgcagggcttgctaagaaatttaacgctgcgtataccaggtacgccgacgacatgactttcagctttgctacagatgatcgccagtctatctatggcgccatagcctcaactaaaaagattgtgggtcaatgcggatacaagttgcaccagaagaggaagctgagactggccagaaagcaccagcggcagtgcgttaccgggctggttgtaaacgagaagctggcactgccacgccgcactagacggtggctcagagccgtggaacaccgactggcaacaggcggacaagccagtctcagccctgcccaactcgccggatggaaagcactgcaggcgatgattgaatcatcctga

SEQ ID NO: 14007 - RNA, 936 nt, synthetic construct
  source 1..936: mol_type = other RNA
atggggctctgggacgcactacggtccctgctcggtttcaatgctcgtcgaccggctagacccgatcctgggctccctgcaactagggcgatggcagagccaggtagggacaccgggcagttagctcaacgcctcggcgtaccgctcggatacctggaaaccattcaaccccagtacaggacatttactatcccaaagtggtccggcgccccacgcactatactagcaccccaggacgacctgaaacagctgcagagaaccattctgcggcgcctgctgggaagactggcctcacatcgcgccgtgacaggctttgagagggggcacagcatagtgacgaacgctcgagtccacattggcgcggccgtggtcatccgcatggatctgaaggattttttccccaccactaaagccgccagggttggagagtatttcagattgataggttggaatgatgaagctgcagccttgttgatgcgcctttgtacccatgggggctctctgccacagggagctcctaccagcccccgtctctcaaatttggttaactatcgaatggacgcccgcttggctgcactcgccgctaaacttggcgccgcctatacaaggtatgccgatgacattaccttcagtttaggtcaggactgcagatggcttgctgccgctgcaatccggggcactaaggcgatcgtagcagactacggatacacgctgcaccagaagcggaagctgattatccggagaaggcaccaatcgcaacgggtgactgggcttgtcgtgaacgagcgggtggctcttcctcgttctacgcgaagaaggttacgagccatcagacactgcctagatacaggcagacctgccacactgacagccagtcagctggctggatgggatgcgctggagcatatgatcaggacccagtcccggagcgaatga

SEQ ID NO: 14008 - RNA, 1113 nt, synthetic construct
  source 1..1113: mol_type = other RNA
atgggctttttcaaagacctgggcaagaaattggaggaagctcgccggctggccgaggagttgcaacagcaggcccaggaacaggcccagaagctgggtcagcaagccggcgtgcccattcctggtgctccagcacaaccccctgggacaggggctcctggtcaaccagcctggggaggacagcctgctcaagaagcaaggggtggagccgctcccgcaccaactatggcaccaggcgagagagaacctgcgcggaggagtcctccaccagccagatttgggccagatgagcttgctcgacgcctgggaacgaccgtcgatgccctaagggcagtacagccggactacacagctttcagcatccctaagcgttcaggagggcagagacggattctggctccggaccctgtgctgaaaagcctgcagcgacaggtgctccggcgagtgttgggacgtctgcgagcacatcccgccgcaatgggattcgagcgaggacggtcaatcgttacacacgctagagggcatagtggtcgcgcggtagtggtccatatggatattcaggactttttcccctctacaagggcagtaacggtgcgtgaatatttcaggcagcttggctgggacgacgcggcagttgacctgctggccaagctcaccgtgtgggaaggctctcttccgcaaggggccccaacttcccctaggctcgcgaacctggttaatcggaggctcgatgcccgcttagccggcaaagcagcccgcttaggcgctacctatacaaggtacgcggatgacataacattttcctttcccaccgccgatcccaaggcagtgatagacgccatcaggttgacccgggatactgtggcccgcgagggatatgctctccacctccgccggaagctccacgtcaggaaacagcatcagagacagctggtcaccggcctggtcgtgaacagaggggtgggcttaccccgtgagagacgcagatggttgcgggccgttgagcaccacctgtccactgggaagccagcaactcttacccaggcccaacttgctggctggtacgccctagctcacatgatcgaaacccagagaaatgctccccccagctga

SEQ ID NO: 14009 - RNA, 969 nt, synthetic construct
  source 1..969: mol_type = other RNA
atgggcctgggagatatcctgcgacgcatctttctcggcaaggatgcatcccccgcgtctccgagagcacacgtgaacccctacgcccacagaccagacagcatttctgacgtacctgtgcgggatcagccatccagggacctgcatgagttgagtcagagattgggcatggacgccggggaacttgccgcatgccctatcgagtattctgtgtttcgtatcccaaaacgttccggtggtaccagagagatatcagccccttctgcgagtctgaaaaccttccagaggatcgttctgcgccggctgttagcccgactgaaggtgcaccctgctgctgaaggcttcgaaagaggacgtagcattgtgacaaatgcacggcggcacgtgggtcggtcagtcgttctccacatggacattcaagatttcttcggcagaaccactgagaggagagttagggactattttagaggcatcggatgggataagcaagcagccgcgctcctgacccgcctatgtacgcatgggggcgcattacctcagggggctccgacaagcccaagactaagtaacctggtcaattacgtcctcgacacgcgacttcacgctcttgctgctcggatgggggcagcctatactaggtatgccgacgatttgacattctcctttgaggctgaccgccccggagccgtaggatcagtcatccgggccgccaaggggattatagatgagtacgggtaccgccttcatactcgaaggaagctgcacgtgcgccgcgaacatgaccggcaggtggtgaccggcctggtcgtaaaccgtaaagtgcagctgcccaggccaacaaggagacgattgcgggccgttaggcaccatctcgccactgaccgcacagcgacccttactcccgctcagctcgccggatgggatgctctgcagtcgatgattaggacccaagctgatgccgcaagctga

SEQ ID NO: 14010 - RNA, 996 nt, synthetic construct
  source 1..996: mol_type = other RNA
atgggtctttggcagataattcgcggcctgcttggaagcagtgaggccaacccatatagggcagctggcgcacctgatggtcctgtgggtcgagggtcagctgccgctgctccatctcctcctaaacgcagccgtcgcagaccccctaaattttttctagctgatctcgctctgcggctcggccgtgacagtaatgccctcagccagatcgccgtggaatatgaaaccttcagcatagcaaaacgttctggaggccggcgaacaatccatgcaccccagccggggctgaaggccttacaacgggatattctgcggaaggttctgggtggcctcaaggcccatccggccgttaatggatttaggcgggggcgctctattgtcacgaacgctctgccccatgtcggacactcggtcttagtaagactggacatccgagacttcttcccttccacgacagcgcgcagggtggaggagtattttaggttcatcggctacgacgattcttccgccgccctcctgacccggatctgtactcaccaaggggcccttccccaaggggcaccaacttcaccttgcctcagtaacctgctgaattatcgattggacgccaggttaagcgcactggccgcgaaaatgggcgccacctacacacggtacgccgatgacatggcattctccttctctgagccagcagatgctgctagagtgaacatgctggtcagtgccgctcagttggtgctatcaggatttggctaccgaactcatcaccgcaggaaaaggtccgttagacggagacacatggcgcagtgcgtgactgggatcgtggttaacgacaaggctaatctcccaagagcgacccgcagaagattgagggcagtcaggcaccatttgatgacaggaaaggaagcgagccttaccgccgcacaacttgccggatgggacgctctgcagcacatgattaaggtgcagtcagtaccaccctccgtgccccagtga

SEQ ID NO: 14011 - RNA, 918 nt, synthetic construct
  source 1..918: mol_type = other RNA
atgggcttgggggaatggattgggagacttttcggcgggaagtctcaagaccgtgggggttccgtggctccagggagactggtcttggtggaactctcagcacggttgggcgtgagcgtcgccgagttacaggcagctcgagtcgagtatgctcaattcaccgttcccaaacgtagaggcggtcagcgaaagatcagtgctcctagcgatgggctcaaaaccctgcagagaaggattctgtaccggctccttggacggctgaagagccatcctaccgttcaaggctttgaaaggggaagatccatcgtaactaacgccgtgccacatgtgggtcgcgcagtcgtgctgcgtatggacattcgcgacttctttccaacgactacagcgaaacgggtggagatgtatttccggaggacggggtgggacgctgaatctgccgctctactgaccaggctctgcacacacgaaggcggactgccccaaggtgctcctacgtcaccgcgacttagtaatctggtgaaccaccccatggacgctcgcttagaggccttggccgcgacagccggagcaacatacacaaggtacgccgacgatctgaccttttcgctgcctcaggataccccgggcactaccgccagactaatcggatccactaaagcaatcctacgctcttatggctaccggttgcatcaggataagaaactgcggatatggcgacggcacgaccgccagatggttaccggacttgtagtgaatgagcgcgccaacctcccaagacgcctgaggaggaagctcagagccatagagcaccacctcctgactggaaggcctgccacacttactgcagatcagctgaatggctggaaggccctgcagaacatggtcgatgctcaggcgttaccccccgcacaggagtga

SEQ ID NO: 14012 - RNA, 969 nt, synthetic construct
  source 1..969: mol_type = other RNA
atggggctgttcggctttattaagggcttgctgggaggcggtgcaggagatccgaggaaggaccccaccgcctctttcaagcgcgagcgacctccaaccagtgagcgagctgccccacccagacggagaggtagcagaaggccgagagatatcgccgctcttgccgcttggattggcgtcggcgaacgcgaacttaccagggtgtcgccctcctatcagactttttttatccccaagagaaacggcgacaggcgccgaatcgatgccccttcagctgagttgaaaaccctgcaacgccggataaatcgcaagctgttgcgcaggctgaaaacccacagggcggctacaggctttgagcgagggagatctattgccactaacgctgcggcccataccggtaacgccgtggtggtccagatggatatcagagatttctttccctccactactacacagagagttcttgattatttcagggccataggctgggaagacgatgctgctcgcctgttagtggatctcaccacacatgaaggggggttgcctcagggggccccaacatcacctcgtctgagcaatctagtcaatcaccagctggacgcacgtttagatcgccttgccgcacgctgtcacgcagcgtacacgcgatacgccgacgacatcaccttctccttcgcagacggggacccactcgtggttcggagagtaattcgggcgactaaaagtatcctcgcagagcacggataccggatacaccaccggcggaaactgcatattcggaggcgtcatgagcgccaggtggtgaccggtctggtagtcaacgacagggcaaatctccctcggcatacaaggagatggctccgagctgttgagcaccggctgatgacaactggaagcgccacactcacggagtctcagctagccggatggcgggcactgagacaaatgatcgaccgtgaaaggggatga

SEQ ID NO: 14013 - RNA, 951 nt, synthetic construct
  source 1..951: mol_type = other RNA
atgttggcttggctgtttcaactgctccttagatccctcatcggcacctcaccacgcaggcactttcggttagctgagtcataccgggaaccctctccaaatcgatacaaaccaaagtgggtgaagcagagaaccctcgccgacctcgctaagcgtctgaacgtgagtatcgagacactgcagagtcataagccgacttatgcgcagctgtcaattcccaagaagtccggcggaacgagaatgttgcatgtacccgatgcagcaacaaaacggctgcagcgggctctactgaggcgtgtgatcggcccagccaaatcgcacgatgcagccatgggatacgagaggggtcgcagcatggttgaccacgctaaaaggcacgccgaccgggccgtcgttattggcattgatctccaaaacttctttcccagcacacgagcagcttgggtccgcgattatttcatagccgcgggctgggacaaggaggcagcgaaacttctgacccaccttactacacatgaaaatgctcttcctcaaggggcccctacttcccctaaactctctaacctggtgaaccatttaatggatgcccgactcaccgggctggcacgacacttcggagccagatatactagatatgccgatgacattatcttctctctgcctacggacgacagcttgctagttaagagtctagtcaatctggctatgcacgtcatcgcaaactgcgattacaggccccattggaagaaaaaattgtttatccgtaggagccatcagaggcagcagatagcagggctggtggtaaacaatggtcctccacggctgtcccgcgaaactaagagatggcttcgcgctgtgcgccacagactggccaatgggaagcaggccaccttaaccccgtctcagttggccggatgggacgccttcgagcacatggtggaaaatacatga

SEQ ID NO: 14014 - RNA, 960 nt, synthetic construct
  source 1..960: mol_type = other RNA
atgggtttaattcagtggatagctggtttcctgtttggccgccctaatgagccgatctcccaagcccagatcgatgctgctttcccaaaacgccggagagtccgcaggctgagtttcgaagagttgagcagacggctcgatgtgaacgaagccaccctcaagggctttcgccccaggtacacaagattccaaatccccaaacgggcagggggctcgaggcgaattgatgcccccgatgcggccacgaagaagctccaacgtgcaatagacaagcgggtgtttggaggtgtgagactgcacgcggctgcaatggcctatgtgaggggcaggtcttatgtgcatcacgccgcccttcatgccgatcgtgctgtcgtagtatccatggacctggagaactttttcgggtccattagaagatggagagttgaggcacttgcgagatggttggggtgggacgaagaggcagccggacggatcgcagatttatgcactctagacggcaggcttccacagggtgcccccactagtccccgtctggcaaatatcctgagcataccgatggaccgcagactcgctggactagcccgaagccgaggggcagtgtactctaggtacgccgatgatctggtgttttcatttgatgctgacgagcaggacgtggttcacgaagtcgttcacattgcgaatctgatcatctgggagtcttggggcttcgagatggaagtccatcacaagaggaaactgcacattcgccgagccggatggaaccgccaggaagtctgtgggttggtggttaatgacggccctccaagacttccacgggaaacccgacgcgctctgagggctatgcggcatcggctggaaaacggaggagacgctgacgccacacctacacagctcgccggctgggagagcttggagcgtatgattcagcggcaggggtcctcaacccctaggtga

SEQ ID NO: 14015 - RNA, 1056 nt, synthetic construct
  source 1..1056: mol_type = other RNA
atgggactgtttcggtggctcaagaagaagttagcccctcccgaccctttcgccgcctttgagtcacccgctgcacggtctaatgccgctggtggggttccaggaggagtggaagacgccgctggcgctgcaagaagatcaccgctgaggcgcagtagggctcctcaccgtgacggaagggatgctggaatcggcgccgctcgctttggcttggatgaactggccaggcgatgcgctggtcccggtatcgaccccttgacggtggaaccaggatatcggactttcactatcaccaaacgcaatggccgccctcggcgtattgacgcaccagacgagtccacagccagagtgcagagggcaattctcagaagggtgcttgggggcattccctctcatggtgccgcccatggtttcgagcgaggccgtagcgtggtgaccaatgcatctgtccacgtcgatagcgccgtcatagtgaaaatggatatccggaacttcttcggcgcaacaagggcggagcgagttctagggttttaccgtcggtttggctgggacgaggcttccgccgcaagactgactgaactaacgacacttcgcggcgggttacctcagggtgcaccaaccagcccacgcctcgcaaatttggttaactacagactggacgcgtcccttcatgcgttggctgactctgtgggagcccgatataccagatacgccgacgatatgacatttagcatggacgaggatgacgcttcgatcctgaactccataattggcattactcgcgatgcgctcattgatttcggatatgaaatacactggcggaaaaccctgcaccttaggcggactcaccagaggcagaccgtgaccggcatcgttgtaaacgatggggtcagtctggccagggatactcggcattggctgagagcggtagagcaccatctgagaacggggagagcagccaccctgacaccgacacaactcgctggctggcgcgcctacgaggcaatgatcgaccgaggggtcaacgatgatgggacaatcgccgacgaaggatga

SEQ ID NO: 14016 - RNA, 954 nt, synthetic construct
  source 1..954: mol_type = other RNA
atgggtcttttttcctttttgcatggcctcttcggcggaggcagatatggatctgaagacctcgcccaacggctggggctcatggtgaagtggctggatgagacaaaaccccattatcagcgttttactattcctaagcgggcggggggtatcagagatattgatgcaccaaatgatgagctaaagaagttgcagcgcctgatccttcacagggtgctggcaggactgaaagcccatcctgcctgtaacggattcgagcgccatcggtctatagtgagtaacgcgcgtgtgcacgcacgcccggatgttgtcttaagaatggacatacgggacttttttggctcaaccggcgccgctcgggttaaacggtattgcagggctatcggctgggatagacgcgcctcgaacctgctcgtcaagctatgcacatggcaaggaggcctgcctcagggtgcgccaacaagcccacgcctcagtaacttagtcaattaccagatggacgctagactggctgggctggcccaatcaatcggcgccagatacaccaggtacgcagacgacattaccttctccttccgggcggacgaggccaatgaagccagatccagcctggcacgaaatccgaagaccctcgatcccgcagaatgtcgggacgatcacagactgcccactgctttcgctattaggatgaccaaggccatcttggccgactacggttataaaatccatcacaagaggaagctccacattaggcgaaaacaccagcgacaggacgtgacggggcttgtagtgaatcacaaagtgaacctgccaaggaggactcgtcgctggcttcgagccgttgagcaccatttagctacaggacgccccgccactttgtctgcagcccaattggctgggtggcacgcactgcagcatatggtagctacgcagagccagcccgggtcaccttga

SEQ ID NO: 14017 - RNA, 1170 nt, synthetic construct
  source 1..1170: mol_type = other RNA
atgccctggggccccgatccagcctctctatttgtggatagtacaagagcaagacgccacgacgtacctgccgcactggcagctccctttgccggacgtcgaactgcacttaggaggccaggcccggtagccggtttggagactcagctgcccacttggcacgtagggcaaggtggtgcaggagccgggagaaaagcaagagccaggcctcgagcccccttcacagctgctgaccctatggggcttgccgacttactgcggggcctttttgggagaagcggtccagagccagaccggggtgctggaattgacgagctggcccgtcggctcggagtttcggtggaagcactgcaagctaccccagtcgcctaccggagtttcacgattccaaaacgatccggacgcggcgaaagacgcattgacgccccggaacccgccttgaaagcactacagaggcgaatattaagaaggctgctgggacggctcaaggctcatcctgcggctaccggcttcgaacgctgccacagcatagctacgaatgcgctttgtcatacagggcaggctgtcgtcctaaggatggacatccgcgacttctttccctctaccagagaggcccgggtgcaccgatatttccagaagattggctggaaccgtgacgcctcaggcctgctgaccaggctttgcacctatcgtggtggcttgccacagggagcgcccacttctcctcgcctgtcaaacctggtgaatgttctcctcgatacgcgcctcgaggccctggcaaagagcatcggcgcagcctacacacggtacgcggatgacctggttttcagctttgcgaaggatgaacgggtgtccatccatgctgccatccagaccacaaaaaccatcctggaagacgagggctatgccttacatcaggataggaagttgcagatcatgcggaggcatgagagacaacgcgttacagggctggtggtcaacgatggcgtgagactccctcgcgagacaaggagaaggctcagagctgtggagcaccacctccggactggtcgacctgccaccttgactgctgctcaactggcaggttgggaggccctgcgctccatgattgataggcaggtggatgctgcccgtggaggaggtggagcaggggaaggtcggggtgtctga

SEQ ID NO: 14018 - RNA, 921 nt, synthetic construct
  source 1..921: mol_type = other RNA
atgggcatactgaactggctgttgggcagacgtctgagagcacgaaggcccgccgaatacggaccaccacgatttggcttagctgatctggtgcggcgcctcggcttaagtgaggccgagttgcgggctgtgcgcgcttcatatcgcgagttcgaagttcctaaacgaagcggcggtaccagaagactggccgctcctgaaccggcgctcaaagccctgcagaagcgtatcctgaggcgcgcattgggacggcttaaggcccacccagctgcgacagggtttgagagggggcactcgatcgtgacacatgcactgttccacgccggtaaggccgtggtcgtccggatcgacattcaggagttctttgcctccacagctgcttgcagagtcgaggactatttaaggcggattggctgggatgcagaagccacagccgccctcgtgaaactgtgtactcacaatggcggactaccccaaggggcccctacctctccgagactgtccaacttggtaaatcgcgggctagatgctagaatgcagaggctcgcagcaggattgagcgcttgctactcacgctacgctgatgacctgactttctcttttgaccgcgatcagagcagtgccgacgtgcgtcggctgattggaggtgcgaaagcaataattactgcctgtggatatcgcatgcatctcaagcggaagctgcatgttaggcggtgccaccagagacagcaggtgaccgggcttgttgtaaacggacagccctcccttccaagggaaactaggagacgactgcgtgcgatcgagcaccatcttcgaaccggccggcctgcatctcttacgcccgaacaactcgccggttgggacagcctcaggtccatgatcgagacgcagagggcacaaagtcccggtgggaccggctga

SEQ ID NO: 14019 - RNA, 975 nt, synthetic construct
  source 1..975: mol_type = other RNA
atgtctggcggcccttgcgcaggtcacttcggaggtgctggggcacggcctagacctcagtcactccataagggaggatcaacggtaggcctctgggatcggatacgtaggcttcttgggggcggaacccctggccatgacttaccatcactggccgagcggctggaactcacagtagatgagttaagagccgtggaaccgaggtatcgaaccttcgacatccccaaacgctccggtggacaccggacaatcgatgcgcccgacgacaggctcaaggagctgcagaggcgagtgctgcaccgtgtgctgcatggtctgcgcgcccatccagcagttcatgggttcgaggacgggcgaagcattgttactaatgctaggctacacgtcgggaaggccgtggtgataaccctagacatcctggacttctttagtaacactaccagcagagatatttataggtatctgcggtttgtcgggtggagccgcagtggtgccagagagattgtccgcttgactacttatgagggggtgctcccacaaggagctccaacctcgccccggctgagcaacttggtgaactaccgcatggacgctaggcttgccgggatggccaatagttttggaggcgattacacgcgatacgctgatgatcttactttttctttgacatccgacgaacgggtggcagttcaaggacttatccgtacggcctgcgagattatcagagatgaggactacgaaccccatgcagataaactcaccgtgagaaggagacaccagcggcaggaagtcaccggattagttgtcaatgagcgcatccacctgccccgcgagacaagacgatggctgagagcggtagaacacaggctgcgcaccacaggctcttgttccctgacagaagctgagttggatggctggctcgccctgacttccatggtccacgagcagggtgaaggtgtgggcgtgccagactga

SEQ ID NO: 14020 - RNA, 903 nt, synthetic construct
  source 1..903: mol_type = other RNA
atggctggtctgttcgcgtggatatcgaatcgactggaccccgggcgcagtgtggaagatttagccaggtggctgaaaattgaggtcgccgacctgcagagtgtggagcctaattacacaacctttagaattcccaagcggtcaggaggatttcgcaccatcgaagcccctgacgaaaggctcaaagaagtgcagagattgattttgagacgggtgctaggcggcctgaaagcgcacccttgcgctcttggattcgagagagggcggagcatagtgacccacgcccaagctcatgtcgggaaggccctggtcattcgtctcgatctcgtggactttttcccaaacacacaggccgaccgggtgctggaatactttcgctctatcggctggaaccggcgggctgctcaactcctggtgaagctgactactaacaatcgccatttgccgcagggcgcaccaacctcaccaaggctcacaaatctggtaaactataagatggatgccagacttctggcaatggcacgcaaggtagggggtacagacgccacatacactagatatgcagacgatcttaccttctctgttgcgcatgagggtgagcacactagcagggacatcatccggggagcttccacgatcgtgcgcgataccggctatctactgcatagaaagaagaaaacccacatcttgcggtcccatcagcgccagactgttgcaggactcgtggtcaacgataaagttgatctcccaagggagacacgtaggtggttacgagccgtcgaacacagggagaggctgggcagagaggcaactcttacgcccgcccaattatccgggtggcgtagcctgagacacatgattgacacccagcgcgatcctcccgctcgagttcgaaggcgatga

SEQ ID NO: 14021 - RNA, 930 nt, synthetic construct
  source 1..930: mol_type = other RNA
atgggccttatggatttcattcggaggagatttggtggcgggagcggacgaagttctcttccagcccctgacgtaggaatggatgagaaacatctagccggccggctcggtgttttgccaggaaagctggagctgctgaatcccacatataaagtttttgagatacctaagcgcggcggcgggagaaggaagatcgaagctcccgccccgatgcttaaagaaatgcagaacctcatactgaggaagctgctgcggcgactgaaggcgcacccttgtgcctacgggtttgagcgggggcgttcaatcgcagggaatgctgctgtgcacgccggcaaagccgtggtggtcaggctggatctgaaggacttctttccctcgattagtgccgacagagtcagacgttattttcgcaggattggatggaacggcccggccgctgaactgctggtgaaagtctgcacccatgagggtcgcttaccacaaggggcacccacctctcctaggcttagcaacctcgtgaattactccctggacgctggcttgctcagtgcagcaaaaaagtaccgagcagactacacacggtatgccgacgacatcaccttctccttcgcaattgacgatcccgggcgcatccgcagcctgattggctcagccaaggcagtgctcagcggagagggctatagaatcaatctccacaagaaactgcgcgtcgccagatcccaccagagacaaaaggtgacgggtctagtggtaaactctggagttaaattgccaagggccactcgtagaaggctccgggcaatccggcaccgattagctgcggggaagcaggctacattgaccgccgcccagttagccggatggactgctttcgaagctatgatcgcggcgcatgatgatcccgctgctgcaggaggtcaggcctcctga

SEQ ID NO: 14022 - RNA, 954 nt, synthetic construct
  source 1..954: mol_type = other RNA
atgggcgtgttcgacttgattagacgcttcttctcaaatcgggattacgatattcctcgagatgaccctagacaggttccccatgaccttagcttagaagtcagatatccacccgccctttctgttgccaccctggcggaaagactcgggatagccgagggacggctgcgtaatattgagccgaactataacaccttttcaattccgaagcggagcggtggaaccagacggatccacgctccctcccgtgaactcaaagccgcccagcgcaggatcttacggcgactgctagccaggctgaatgcccacccaactgtgtgcggctttgagagaggccagtcgaccgtcacccatgccctgctgcacgctcaacaggcggtcgtggtgaggctcgacatcaagaacttttttaccagtacggacgcctctcacgtagcaaaatactttcggcaaatcgggtggaaccgagaagcaatacgcctcattacagtgctgtgtactcatgacggagctctgccacagggcgctcctacaagcccacgcctgtccaatttgatcaactaccgaatggatgcaagacttgccgggctggctcaaaaccagggcgcatggtattcacgctacgctgacgacttgacattcagtttcgcagaggatagcggggagaggattcatactgtcataaggggggctcaccgcattgccgaacagcacggttacgagatccaccagagacgtaagcgccacatccggaggaggcatcagcagcaattggtgacgggacttgttgtgaatcagacagtaaggctccctcgccatatccggcgatggctacgggcagtcgagcatcacagaaggacaggcaaacccactaccctgtctgattcccagtggcagggttggcaagcgtatgctgcaatggtggagcgtcagtccggagccactccccagtga

SEQ ID NO: 14023 - RNA, 957 nt, synthetic construct
  source 1..957: mol_type = other RNA
atgggactgttcaactggatttccaaactgtttaggcgcaccctgcctccttcagttttcaagtaccctgagccaaggtgggacaagaaagagcttttacgacgtctgaatctcaacgagataaacctgatctataccgtgagagggtttaacccgagagacacaaatctccttgccccccatctcatccccctgggctattggtggcacaaaattccaaaaaggtccggcaagccacgtatgctgtattctcctaacccccggctgaaactgctccagaagctcttgttaagaaaggtcttcgctaagctcgctgtgcacagcgcctgtaagggctttcgacggggacagagtaactgcactcatgcccgacttcacgtcggcaaagcagtcgtggtgagaatcgatatcaaggattttttccatagtacaagcggaaaccaggtgtacgactttttcagaaggataggttggaatcacgaggctgcatctctgatccaggccatatgcacccgcaagaaccggttgccccaaggcgcacccacatcaccaattctcagcaacttggttaattaccggatggacgcccgtcttgcgggactagccggtaagtcccaggctatttatagcaggtacgcagatgatctaattttctctttcgaacaggacaatcgccgctttattcggggggtgattcggcgggtggttagcatcctgttcgaatcgggctacacgatcaataggaccaaattgaatgttatgaggcagcacaatagacaggtagtcacagggttggtagtgaatagaaaagtccatctgccgagatctactcgcaggtggcttcgatccgtggaacaccatctgaacactgggaagtcagccacgctgacccgcgagcaattagcggggtggaaagcttaccagcagatgatccaaactcaaagtaccggtaactga

SEQ ID NO: 14024 - RNA, 972 nt, synthetic construct
  source 1..972: mol_type = other RNA
atgggcttcctgagctggctcctgtggggatcggggaaaagcgtgggcgatcttgctgaatggctcggtgtagacgtcaggcagctaaaaaggctgaagccggaatatcgggaatttactatccccaagcgaagtggcggcgtaagacgtatcgccgctccaagtgacgagctgaagaggatgcagagacggattgggaggcggttactgagagggttgagggcacacgaggcagctcacggcttcgagcgaaatcgttctatcgtgaccaacgcccgcgtccactgtggtcaggacgtggtcgtgcgtatggacctggtggacttttttccttccacttctgcgagacgggttcatcgctactttcgccgcatcggatggaatcgccctgcagctcggctgcttacaagactgtgcacccatgagggcgggcttccacaaggcgctcctacatccccgcgactaagcaacttggttaactatcgtctggatgccagaatagctgggttggtcgctgcactcggaggcaggtacacacggtacgccgatgacttaaccatttccttcgccgctgaggatgccgaagacgattgggttatacgatctggaccagccctcccttttgtgttagagggccaccccgagaagattcggtacctgaggtcattcattaggagagtggccggacaggaaggttatcgggtacaccgccgaaaaaagacctcagttcggcgccgccatcacagacagatggtgacagggctcgtcgtgaatgaggtggtgaacttgcctagggaaacgcgacgccggctcagagcaatcgcccatcgcgcagagcagcagaaaaggccccttctcgacgcggattacagacccttcagctatggtaggagacaaccaactctgacccccgcccaactggaaggatgggaagccctgcaggcgatgatcgtcaggcagcgggtggagtga

SEQ ID NO: 14025 - RNA, 996 nt, synthetic construct
  source 1..996: mol_type = other RNA
atgaccatgggcctgatagggtggctgctctggggtaggggccatggtgtcggggaactagcgaggcgtttggacatcgagaggcgggatatacggcgcttccagccccagtatcgagagtttaccatcagcaagcgctctggaggaaggagaaagattttcgcccccaacgacgaattaaaaaagttacagcgccgcattctgcgtagactactcgctcggttgagagcacaccctgcggcccatgggttcgaaaggaggcgctccatcgtgaccaacgcttcggcacaccaggaccaggatgtggtgatgcgatttgatctggtcgacttctttccaagtacctcagagcatagagtaaagaggtatttccggcgcatcggctggaacagacctgctgcaaagattttgacgcggctgtgcacttacaatggcggacttccccaaggcgccccaacatctccacggctgtccaacacaataaattacctgctcgactctcgcttggctggaatgatcaacgccattggtggggcttataccagatacgccgatgacatcaccatctcattcagtcaggaagctgaggaggactggggcattaggagcggacctgcacccccgtttaccctccggaagcatcctgagaaaatcagatacattagggcctttgtcaggagggcggtgagagaagccggataccaggttcaccgcgggaagaaaatgaatgtaaggcgacggcatcaccggcaagaggtgactggccttgttgtcaatgatcacgttaatctgccccggaaaactcgtcgctggcttcgagccgtggaacaccgagcacggctgctcagccaagatcgcgagcagagccgttacgtgatgagaaaacgaccaacacttacaccgctgcagctggctggctggagagcctatagagcaatggtgctcaatgggacaggtaagactgccaacgctacggccactagatcccacaaatga

SEQ ID NO: 14026 - RNA, 1179 nt, synthetic construct
  source 1..1179: mol_type = other RNA
atgatcagacggccagggccagatgggttagcagagcgccgacgggttgggcatctctactttcggagacgcagggcgggaccacagatccaagtggcagacaccaagcaggattcacaaggagcggccaaggctaacggccggagaggtgctctgtgtttcgccaaggacctcttccccttttccacacagtattctcgacggtccgtgatgggttttctgtcctggcttctctggggccgcggatttggtctgggagagctggccaggtggctggatatggacgcccgggaacttcgccgattccagcccgagtataggaggtttaccattcccaaacgctctggcggcaccagaagaatattggccccggacgatgagcttaagaagctgcaacgtaggattctcaggaggctgttagcgaggttacgtgcccacccggctgcccatggtttcgagagaggaagaagcattgtcacaaatgccagagcccaccaggggcaggaagtggtggctagatttgatctagtcgatttttttccaagtactagcatccagcgtgtgaagacgtacttccgcagaatcggctggaaccgtcggtgcgcaaaaatcttgactaggttgtgtactcacgaggggggccttccacaaggggctcctaccagcccccggctaagtaacctagtgaactacaggattgacgcccgactggcaggcatggcggatgcattgggcggtgtgtatactcgatatgcagatgacatcacaatctcattccccaaagacgagccagaggaagaatgggtaatgcgggccggagagccacctcctttctcgctcgcacggtgccccaagaaaattgcattcatgcgcgccttcgtaaggcgggttgtcggcgaagaagggtaccgcgtgcatcgccgaaagaagcagtctgttcgtcggcggcaccatcgacagatggtcacaggtctggtggttaacgacggggtcaatctgcccagaaagactcgccgctggttaagagccgtggagcacagggccaaaatggccaaagagacacctttcgacttcgctaatccttccgctaaaaggcctaccctgaccccttcacagctggaaggctggagagcttttcaggctatgatagctaatcagagcacgggaggagaagagtga

SEQ ID NO: 14027 - RNA, 1020 nt, synthetic construct
  source 1..1020: mol_type = other RNA
atgggaattcgggatcccgtagtgaaactcttcgattggattgtgaacggcaccggccatggcaccactgagcttgcccgtcgactcggtatcccagagcaggaactgaggacagtggacccagtgtatcacgcgttctctataccaaagaggtcagggggtacgagaaaaattctggctcctgaaccccgcctgaagcgctttcaaagactgctgctccgacgggtgtttgccaagctctccgttcatcccgccgctactggttttgagcccggaaggtccatcgttactaacgctcgaacgcatcagggccaggccgtggtactgagattcgacctaattgactttttttctagcacgtctaccaagaggcttagaaagtatttccggcagatcggctggaataggccggccagtaagttactgttgcggttatgcacccagcaaggagggctgcctcaaggagctccaacaagcccgcgcctgtcaaacctcctgaattacaggctggatgcaaggctggctggattgatcgttaaactgagagggagatacacaagatacgccgacgacatcacaatttccttcgcaacccgggatcttcacgcagctgggaagtccgacttcccagctcgcaattctgcaggcgggactcccaatcacccaacccagacccctactgggcaggatacaatccgctctatcacacgggccgtccaaaaagttatagagagcgagggctatcgcatgcatcaccgtaaaaaactgagtgtccggcggcagcaccaacagcaggtggtgactggtctagtggtcaaccagagagtgaacttgcctcgtagcacccggcgatggctcagagccgtcgaacaccgcacacaaatgtcacagcccttaagccttacttcgtatcagcctggaagttacagcaggagaaagagtcccaccctctcccctgcgcagttggaaggctggaggtcatttcgagcaatggtccagcgccaggccatagacgattga

SEQ ID NO: 14028 - RNA, 987 nt, synthetic construct
  source 1..987: mol_type = other RNA
atgggcctgattggcagactcatcggctggctgacaaaagggcggggacacggggtggaagagttagcgcggcgcctggactcagaccttctggacttgagtcgatttcaacccgattaccgccctttcactattccaaaaagatctggtggccagcgaagaatcctggcccccgagaggcacctgaagagactgcagcgacgtattctgatacgcttgcttgcgcgccttagagcacatcccgcagccactggatttgaaagggggaaaagcattgtgaccaatgctagagcacaccagggcagggctgttgtgcttaggttcgatctcgtcgacttttttccttccaccaccgctgagcgacttcggaagtacctgaggcggatcggatggaatcgtcctgccactgagatcctcctgcgcctctgcacttatgaggggggtctaccgcagggagctcccacttctcccaggctctcgaatctggttaactatcgcctagacgcgcgtttggccggcatggcagccagattgggcggagtgtatacaagatacgccgatgatctgacgatctctcttccggacgaagagcaggagaaggattggaccattagatccggcccaccgccattgttcgggctcgagacaaaccgggataagatacggttcctccaggccttcgtcaggagagtagtcgaagaagagggttaccgattacacaggcgcaagaagctgtccgtgcgacgtcgccatcaccggcaagaagtgaccgggctggtggtcaacgacagggtaaacctccctcgcagcaccagacggtggttacgggctgttgcccatagggcacggctcgctcgccaagaaggaccaggtccatcaaggccacctagtgggggcctacccaaaaggcctacactgacacccgctcagctgcaaggatggcaggccctggaaagcatgatcgcccggcagagaacggagggctga

SEQ ID NO: 14029 - RNA, 984 nt, synthetic construct
  source 1..984: mol_type = other RNA
atgggctggctagaccgatggtttccgggggaggggcacggaattgacgagctggcccgtcgtctgcatgttgaccctgagcaactgagacggactgccccacgctatcgcgaattttcaatcgcaaagaggaggggcggtcgacgcagaattttggctccgcagactgatctcaagaatcttcaacgcagaattctccgctgcattctggccagactcaaaagccatcccgccgcaatgggatttgaacgaggccggtctatcgtgaccaacgcattaccacaccagggccaggctgtcgtgctccgactggacgtgaagaacttcttcgcttcaactcgcgccggcagagttcggaggtactttagactgatcgggtggaatcggcccgcagcagcgttgctgaccagactgtgcacacacgaagggggattacctcagggcgctcctacctctccaagactgagcaacctcgttaactacccgttggatgccaggctgtcggctatgtgtgagcggttgggcgctgtgtataccaggtacgcggatgacataaccatctccctctccgatgagaaagaggacaggccccttagaaatccccccccccgtaggggtaacgtgagtcctcccccacttagtagcgagcctaatcggctgaggtatctgcggcacttcgtgagaagagtcttcgaccaagccggttacacattgcactggcgcaaaaaggcaagcatacggcggaggaaccaccgacagctggtctgtgggctggtagtaaatcatagggccaatttaccacgcgagactcgaagatggctgcgcgctgtggaacatcgcacgctccttgaaaaacaagccaagacggcgcctctatcctcactggataggggaaggcgtaagtctccaacactcacacagacacagctagatggttggcgggccctgcggcttatgatcacccagcagatggaagagggatga

SEQ ID NO: 14030 - RNA, 1098 nt, synthetic construct
  source 1..1098: mol_type = other RNA
atgaaggatttgcagcggcggattctgcgccgcctgctgaaaaggttgaggtgccacgccgctgcgagaggctttcagcctggagagtcgatagttacccatgcgactcttcatgctggcagagcagtcgtccttcggctcgacttgagggacttctttcccagcacaggctccagtcgagtatatcagtacttccgcaggataggctggaataggcccgccgctcgccttctgaccaacctatgcacccaccaaggcgggttacctcagggcgctcctacttcaccgaggctgtctaatctcctaaactatcgactggacgccagactggcggcaatggcagctaggctcggagcgcactacagccgttacgccgatgacatcaccctgagctttggccaagacgatagagatcgtatacgatatatcattaggttcgttaaacgtgcagccgccgatgaagggtatcgggtgcatggcagaagaaagttgcgaattcgtcggaggcaccagcagcagcgagtgacaggcctcgttgtgaacgccggggtgagacttccgcgccaaacacgacggtggctcagagcagttgagcatcacctcaggaccgggcgcgttgccacgcttacaccagaacagttcgccgggtggcaggcatttcgccagatggtagaagggcggcccagaactgcgtctccagctccactgccacctcccttggtgcctgtcccagtcgagctggacggagcttgggtgctggtcgccttacaaaagaacggacatgctattcccgtgaatatgccagccgaagggatcggtcccgccgaatggacctttgcctccggagagctgcggatcgcacagggtgatcacgaggagcgggccgactgttccgtggatgccagcactgaacctcccagaatcacaatccggccagccggacaagaagcaggaaccgctcagggaattttcaggctggagggtgacaaattaactatctgtgtgagtgaggagggtcagccgctgccttcagctattccctctgtacctggtacgggctggacagtgtaccacctgagagcactcgctcgccgctga

SEQ ID NO: 14031 - RNA, 918 nt, synthetic construct
  source 1..918: mol_type = other RNA
atggggatatttaacaaactgaaaagcctgttctcatcgaattcttccgagccccagcaccaaaccccaaccaccccagcccgttttaacttgctggatttggagcaccgactggacattagtcataggcaaattaagcttataccgctcgactatcatacattcacagttccaaaatccaatggtcacaagaggttaattaccgcccctaatcccgaactgaagaagcttcagcgcaccattgccaaaagactcctgactaagctcgccgtgcatcccaacgccgtagggtttaggaaaaaccatagcgtcgtgaccaacgctaaagcccacactaattcccctatgatcattaagcttgatatcaggaacttcttccagagtactcccgcgcagcgcgtcaatcactacttcagattcctaggctatgacgctgattctgcgcaattgttgacttctataacaacacatatcgatcatctgccccagggagcaccaacgtcccctatcctttcaaatctgctcaactacaaactggatacagccctgacgacgttggctcaaaatcataaggccatctatacccgctatgcagacgacatcacatttagtctggataccaaagactcagaggcagctagaaatctcgtcaacgccgcggcttacctcttacaccagtttggctacaaactcaacaaccggaagaagcgaatcataagaaaccaccggcaacagcgggtgactggactagtggttaatgaaaaggtgaacttaccgcgcgagactagacggctgatcagggctatccagcatgcacacgacaataataagcctactacacacagccctcagcagctgcagtctctgaaggcataccaccagatgattattacccagagcgagtttgaaacccactga

SEQ ID NO: 14032 - RNA, 906 nt, synthetic construct
  source 1..906: mol_type = other RNA
atgggattattcgacaaaattaaaggcctctttggatctggcagttccggcggggtgagcggtttgacgatcgacgatctcgcccagcggcttgacatgccagtggagaggctggaaggggtagagatttcctatcatagtttcactgtgcccaagtccaatggccatcagagaaggatcaccgcccccgatgacaagctgaagcaagtgcagagagccatcctgaaaaggcttctcaacaaactggcagtgcacccaaatgctaccggcttccgcaaaggttatagcgtcgtgtccaatgcacggctccacgtcgggtcagaggtgatcgttaaactggacattcgtaacttctttgagtcaaccaagatcaaccgggtgaacaagtacttcaagtttataggatgggatagaaagactgccaacctcctgacagagcttactacctataaggggggactcccccaaggcgcacctactagttctgcgctatccaatctgttgaactacaaactagactcaagccttaccaccctggctaagaagaagggagcaaggtactctaggtacgctgacgacatgacattttcgttggatgggtctgacagcaaggtcattaactcaataatttggggtgccgaatctgctttgcacgatctgggttaccggctgaataatcgaaaaacaaaagtcatccgcaagcaccgacagcagagagtcacagggctcgttgtaaacgagaaagttgcgctgcctcgtaaaacgcggaagttaataagagctatcgaacactcccaacagaatggccgcccgagcacacatagcgccgatcagctgcgcagtctgaaagcctatcaggccatggtggagaagcagggcgaagatggcgaattagatgagggatga

SEQ ID NO: 14033 - RNA, 939 nt, synthetic construct
  source 1..939: mol_type = other RNA
atgtggcctatcttcacaccgctgtggcgaactctttcaggaggccgaagtgcccccgaagccggaatcgctcccttaccatttgaaagcaactgggcagagcggttagctaggctgggcttgagccccgagaaccagcgtgccattgtagcgtctggagccctccacccacacttgcactactggcgcttccaaaagccaaagagggcaggaggacggagagccatagcagagccagatcggaggctgaaaagacttcagtacgcgatagtgtcctggtgttttagtgctgaaaggagccacccagccgctattgcctatcagaagggccgatccacagctgaccatatctgggcacacgccggggcagagattgttatcaccgctgatatcagggatttcttcccgtccacccgcgccgaacggattgaaacctggtggcgggagagaaccgactccgacactgcgaggctcctcactctgctaacgacggatagagacggcctaccacaaggggcaccaacctcccctgggctgtctaattttgtgaatactgagctggacgctcgtctgacacgacatgcagcgccctcaggtgcccgctatacaagatattgcgatgacctggccttttcgtggcctatctctagcggtcccccttctggttttgagcgcggcgtccgtgccgctttgcatgagttcggctacaccctccaccccgaaaaggggtggagggtcagccatcggagagatgagcccgaaatcgtgggggccgttctcacaagaagtggaggggtccgactgccggacagacttaggcgcgtgattcgggccttggcaaggtcagcttcacctggcgacgtgcctaaactggccggttatagaggctacgcagctcaggtgactaatcggcccggacgccgcaaccctaaaacctga

SEQ ID NO: 14034 - RNA, 930 nt, synthetic construct
  source 1..930: mol_type = other RNA
atgtggcctattttcaccagcctgaggcggaccttaaccgggggaagaagtggaaggacaggggaccggccgccagtctctagtgaagccgattgggccgagcgatttgctagattggggctgccacctgaaaccttgaggaatatcatagccgccgattccctgcacccctattttaggtacagacggttccacaaacccaagcgagatgggggcaggagggaaatcgctgagcccagccctcgcctgaagagacttcagagagagatcatcacacaatatttcgcaaccgaacagccacacccagctgcagttgcgtatcaacgaggcaagtctactgccgatcatgtgtgggcacatgcgggcgctgaaatcgtgataaccgctgatattagagactttttccctagcactagggccgacagggtggagatgtggtggcgtgaacgcgtggactccgagacagcgcgcttactcaccctgcttaccaccgattgcggcgagctgccacagggagcacccactagtccgggcctctctaactttctcaacactgagatggatgccaagttgactaggcgggccactggagcttgtgctcggtacacacggtattgcgacgacctggccttctcgtggccgacaggttttggccctccttccgactttgagcgaggtgtcagagccacgctccacgaattcggttacgagcttcatcccaaaaaaggatggcacgtacatcgccgcggagacgagccagaggtaacaggggccgtgctaacacgctcaggaggggtaagactgcccgcacggattagacagatgatgcgcgcactagcgcggcgagctacttcagccgacacggaacggctgaagggctacaggggttacgccgcaatgattgctacgcgtccccgtcgtcgcggctga

SEQ ID NO: 14035 - RNA, 951 nt, synthetic construct
  source 1..951: mol_type = other RNA
atgaataaccctctgtccaccctgtggtacaaattgaccaacaattgggttgctatatatagacagcggtacggctacagtgatgactatctcacgctgggacagatgttaggctggggcgctatcggggctcttaatgtgcctcaggtgccttacccaacactcctgcgggtacttcggcgcaatagcatatatccggacttccgatacagacattttaccaggcctaaggcggacggctcattgcgagagctggttgagccagatgagaagctcaaaaggattcagcgcaagatcctgaaaactctactgaagaatgcccttattcacccttcagcggtcggatttagacgcaaaaagtcgactgccgatcacgcatgggctcatgcaggtgccgcaaccatcatcacagccgacatcgaagatttctttccccaaacgaagacttaccgtgtcgaagcttggtggaaatcttatttcattgagcagcccgaagccgaatctgccgcacgtctcctgaccctgctcactacctacaaggggtctttaccccaaggggccccaacctccccggcattatccaacatcctgaactacgaaatggacgcggccttggagaggcgagtggtagcctcaggaggtcagtatacacggtattgcgatgacatggcctttagctggggtggaattggcgatgtccccgcggatttcgagacagcagtcaggagtattgtgcaggagtacgggtaccacctgcaccgctgggaagtttggaacgcccacgacgagccagaattgacaggaataatcctagctcgtcatggcggcgtggagcttcccgacgacgtgcaacagaccattaggaggcttgccagaagcactagcgctagtgatatggcaagactccaggggtatcgggcttatgagtccatggtgaagaaaagacgctga

SEQ ID NO: 14036 - RNA, 984 nt, synthetic construct
  source 1..984: mol_type = other RNA
atgttaaatgacctcccaaacactctcaggcggctggtgggactaccgcctgcttacagatatacctcacccgcccggaatgaaggtgaatggtccatggtgactctttgctataggctcggtctgaaagtcgaagacgcccaccagatcatggactctgccgccttcccatctggctttcgataccgcgagttcaccattcccaaacgggatggaagtccccgtcagttattggagccaggccccaagctgaagcaagtacaaagacggattctcactatgctgcttcgcaaagcccagcctcaccatgcagcgtacggctttaggagaaagaagagcatcgccgaccatgcttgggcccacgcaaacagccggatcatcattactgccgatatccaggacttttttccaaacacaacaaggcagcacgtgaagcagtggtggcacgagcaaggattcagtactcctgaggtgagactgctgaccgcactgaccacactgcacggatccttgccacaaggagcacctacctccccccctctctcgaacctagttaatgcccagatggacacggcccttgagcgtcacatacaggccagtggtgggatttatacgagatacgctgatgatctctgtttcagctggccagaggggtatgctccccctgcagactttgagttcgctgttagatccgtccttcacgaatacgggtatgccttgcatcctgataagggatggcaggtgtgggatcgcgatgaagagccaaccataacaggtgtagtgataacaaagcatgggtctgtcgatatccccgactcaatgaaacggattatgcgcacactgcagcagcatggcaccgctgcggacgacactaggctgcagggctaccaagggtaccagaggatgatcacccgcgagccgcgaccggaaaaagcaagcgcgggcttgggcaaggctcccattaaatcacctcgactgcgttga

SEQ ID NO: 14037 - RNA, 915 nt, synthetic construct
  source 1..915: mol_type = other RNA
atgtggcaccgcctgccttatgcgctaaggaagctgaggcagactctcatccccatcagatacgaaccgcccgattatgccctgtggaacctgcaggcccgcttaggcctaacacccgcagaggtgtcacgcctggctatgccgggaccttttcccccacggtttcgttaccggcacttcactgtgccgaaaaaagacggcgggcggagagaaatctgcgcaccaggcccacgcctgaaggaagtgcagcgacagattctccgcgcttacctggatccacgggctccacaccctgcagcaatgggcttccgccgtgctctctccatcgctgatcatgcctgggcccatgcgggagctgccattattatcacagccgatatagaggacttcttccctagcacccgggcacgaagagtggctgcttggtgggccgcacaggggtttaatgacgccgaggtccacctgcttacgcgacttaccacctaccgagggtctttaccacagggggcccccacatctcctgcccttagtaatttggtcaacgccgagttggacgccgcactccacaggagggcccaacagagcgggggtgtctatactagatattgtgacgacctggcctttagttggcctgatggtggcaggcctcccgctgatttcgaaccagccgtgagggccgcccttctaggagctggatacaggttgcattccggcgcggagaagggctggcaaatgtgggcacgaagagacgagcctgaagttaccggactggttctgacaaggcgtggaggtgtagctctgcccccacccttgtatgctaggatgagaagcctcgcgcggtcagacgatccccatgacgcagcacgcttggcgggctacaaagggtacgagctcatgataagaaagagacggtga

SEQ ID NO: 14038 - RNA, 951 nt, synthetic construct
  source 1..951: mol_type = other RNA
atgctcaataagctcccagctcccttgcgcaacctttttggactgtatacaagctatatgcagcctgtcaagcatccaggcgagtatgctctgtacatgatggcctatcggctgggcctcaatagataccctgtgtacaggtttctggagccaggaccgctgcccccctattacaggtatcgccactttaccgtgcccaagcaagatggcacccgaagggaaattgtagagcctgggcctaacctgaaagcagcccagcgcagaatcctccagttgtacttgaataatcgcaaaccccatcctgccgccttaggctttagaagaaagaagtcgatcgcagaccatgcaagagcccacgccggtgccgctttgattatcacggcggacgtggaggacttcttccccaacacgtctaggcagcggatcaagtcattctggcgtcaacagggtttcagcaccctggaggttcgactgctgactgcgctcactagttaccgtggtgcactacctcagggagctcccaccagcccgcctttgagcaatttagtgaactatgaactggatgctgccctggaccgaagagtcaaaccatcagggggcacatacacacgctacgctgatgacatggtcttctcctggccagacctagcgtcccctccagcagactttgagcagacagtgcgggccctgctcagggaagtgggatacactctccacccacgcaaaggctggcacgtgtgggtacggcgtgatgaaccacttgttactggggtgatacttaagcgggatgggtccgttgatttacccgactctatgaggcgaattatgcgggagcttgctcgctctgacgaccccaacgatagagcacggctggcaggttatcagggctacgaagccatgataaccggagatgccaccccggtcagtaggaggaaagctcaagggagatga

SEQ ID NO: 14039 - RNA, 957 nt, synthetic construct
  source 1..957: mol_type = other RNA
atgttgcgcgacatccttcctgctccaattgtggatctgcttactcaatccttaggcgtctctctgcggcgtcctcgcggtttttctccgccagccggagatacatggattatctatcacttcttccgatacactctcgccatgcgcgacgaagacgcccgagcttttctggctggggggaagccccctaagggctttacttacaggcatttcactgtgcccaaaaaggacgggtcagatcggcaactggtcgagcccggctatgcactgaaagcagtacagcgccgcatcctgaggttgctggaggctcgaggggttaccaatcccgcagctcttgcgttccgcaagggcaggtctatcgccgatcacgcttggacccatgccggagcagccatcatcataacagccgatattgaggactttttcctgtccaccagccacaggcgggtgagagaagtgtttcatagcatcggctacgtggacgatcgggctcactacctcacccgcctgacaacttaccggggaagtctccctcagggtgcaccaacctcacccatcctcagcaacctggtaaacgccgaaatggacaagcagatagcccggcggacaagcgaatcgggcggaagatatacacgatatgcggacgatatggcgtttagttggccagatagattccgacctccgggggatttcgaacagacgattagggggattctgagggagcacggttacagactacatcctcgtaaaggctggcgggtttggttaaggcgggatgagcccgaattgaccggcctaattctcaccagaagaggaggagtcgacattccagactccatgaaagtgataatgagagagttggagaaggggcagtcagaggaccaagcacagagactttccggttatgagggcttcagacacatggttcaggccacgaggcgtcgctacagggcctga

SEQ ID NO: 14040 - RNA, 945 nt, synthetic construct
  source 1..945: mol_type = other RNA
atgacaaggttggaccagatcctccccgataccctggtcagagttctcagaatgatcgctacgggatatgagcatattccataccgagggcacgatgatccataccggagtatctattggatggttggctaccgagtcgggattgaccctcccaccatcagagccattatggaagggggggatctacctgcagtgtggaggtatcgccacttcaccgtgccgaagaaagatggatctccaaggcagctgatggaaccaggacgggatctcaaagcagcccaacgcgagttgttgaggaggctgaatagcctggatcctcaccctgccgcactgggctttcgagagggtctgtccatcgccgaccacgcttggacccatgcaggtgccaggaccataattacagcggatattgaagactttttcccctctacccaggccacgcgcatctacgatttttgggtaagacaaaggtgggtctacgacgagatcgcagcgcggttcctgactcgcctcactacatacagaggaggcttaccacagggcgcccctacatcacccgctcttagtaacctggtgaacgtgggcttagacaccaagcttgctgcccgggcaagaagcgctggtgctacatatactcggtacgccgacgacctagtgttctcatggcctgatgagggacggccgccagctgactttcagcacggcgtccatgccgcgctgcatgagttcggctatcgtctccagcccagaaagggttggagagtttggcaccgccgtgacgagcccgaagtgactggcctgatacttacgcggggagggtccgtagatatacccgacagcatgaaagcattgatgcaaactctggaacgtaccgccactacagaagaagactttcagcgccttgctgggtatgagggctacaggcagatggtggtgcgagagtga

SEQ ID NO: 14041 - RNA, 909 nt, synthetic construct
  source 1..909: mol_type = other RNA
atggcatctgtgctcgctcgtctcatgggaattttttccgtgtctactacaaaaatgtgtagggaagacattttcgagactcctcaggtcttccgcttgagcctgctgatggacgtgccatctgcgactcttctacgatttcgtagcggctggccgggagggcgatactactatcggccacttcgctgcgaaaagagagatggctcgccccggcacatatatgcaccaagtcccccccttaaggccttgcagcgcgccttgctgtcttacctgaattccttaaccgtccatcctgccgccctgggcttcagacgaggttttagcattgccgataacgcgcgggctcaccaaggccaggctgttgttgtgaccgctgacatcgaggatttttttgactccacgccggctcagcgcgtccgtgatttcttcagagctgagggttgggacaccaccgccgtctcaatcctcacaagactctgcacattccactcagtgctgcctcagggcgctcccacgagtcctgtgctgtcaaacttggtgaatacacacctggacgccgacttaacccgggtgattctccagagcgggggaaggtactcccggtacggggatgacctgactttcagctggtccactagagcggtcccaagcgggttcgaggcaaccgcaagggcaatcctgctgtcatatggataccacctcaacgcccaaaagggctggcggatctggagggtatatgctggagatgttgcctatatcacaggcataagactgggtctagatggaaggttacatccctctagtgaaatccagcaaaacatgcgcgagctgaggcatcagagaaatgaccctgtagccgccgcacgcctacaagggtaccagggttttattaaaatgcttaggagttga

SEQ ID NO: 14042 - RNA, 942 nt, synthetic construct
  source 1..942: mol_type = other RNA
atgagcccttggaggccattaggtcggttgattcccacggcgctccgctctatcctcccaaggtttgagcacgattccggtgccatgggcagactgtccactatactcgggttaagcgaggacgagctacgcgcctttcgactgggtccaaggtaccactatcgtcccttcacgattcccaagcctgacggccggaatcgaagactgttggctccttccgctgccttaaaacgcctgcagcgctccttgttggatgaatacctgggcagacttcccgtgcatccatgcgctacagcctttcatcctggggcatcaacagttagacacgctttgccccatgctcgaggaacccggatcgccactgtggacctgcgggacttctttgaaagcaccacagccgcccgggtcaggcgtttctttgtgtcaaaggggtggaggggggaatctctcggcgtccttatgcgcctgtgcacctatcgcggctgtctccctcagggagcgcctactagcccttgtctatccaaccttgtgaacgagagactggatgaccgcctgcgggtacttgcaagacgttcaggcggccggtatacccgctatggcgacgatctggccttctcttgggtcgaacggcccatgccagccggattccaacgcagtatcgaggccgctctggagaggagcgggtacagtattcagccaaggaagggttggctggttagggaggcacgaggacgtccccaagtgaccggcgttgtcctcgcaggagatgggaggctccacgtgccctggagatacaggctgagaacagcatggctgcggtggagaggattctggagtcgcgatccgcacgtacgagcgcagtggagagggaggcaggcataccgtagaatggtggaacggggcaaagctggtccgaggcgaagaccaggacggtcgtcttga

SEQ ID NO: 14043 - RNA, 942 nt, synthetic construct
  source 1..942: mol_type = other RNA
atgaacccaggtcaccctctttcctacctggtgcccccaacccttagaaggctactcacccctgcagggccatccagcgcacatgcacaagcactggcccagctgctcggcgttgccgaagacgagctggatgctatcaggttgggcagaagataccactatagacccattcggggcgcaaagccagacggacgcgaaagacggatactagcccccagtccgcctctgaagcgcctgcaacgacggctgctcgacgagcatctgggacggcttcctatccacccttgtgctaccgcatttcatccgggggcgtctcccgttttcaatgctctgccccatgctcgcggggccacaatcgtcactctcgacctgcgggacttctttgaggccacaagggcctggagggtccacagatttttccgcgaacagggctggtctggggaacctctccgagtcctcatgagattgtgcactttccgagatggtttgccacagggcgctccgacttcgccttgtttatcaaacctggtgaacgttcgtcttgatgagaagttaagacgcctggcggctaggagccgaggcatttacacccgctatgccgatgacctaacctttagttgggtggacgggggaatgcctggcggctttcaacgcgccgtggagaatgtgttggagagagagggatatgagatccagccccgtaaagtctggcgtgtgagccgagctcgggacagaccacgggtgacaggcctcgtgattgctggcgatgggcgggtaagggtaccatggcggttccgggtccgcacagttctgttaaggtggaggtcttggctgacgggagatcccgtggcccgagcaagatggaggggatgccaggggtaccttcgcatggtggatcgttcaagggaaggtgcccggtccaggcccaggaaaggtggatga

SEQ ID NO: 14044 - RNA, 903 nt, synthetic construct
  source 1..903: mol_type = other RNA
atgacaccaaggcaccctttggtgaggttactgccgccttgggggcgagatgtggacgaagcattgcagagggaggctgttgccgatctcctgggcgtggccgtggacgaactagacgccattcggatgggtcctcggtaccactaccgccccttagcggggacaaaacccgatggccgagagcgacgcattcttgcgcctagcccagcactgaagaagctccagaggcgcttcctagatgcgtatctggtcgaccaagaagtgcacccagctgctatggctttccgaccaggcggcagtacgcttgcccatgctttacctcatgcccggagccggcttatcgccgctgtcgatcttcgagacttctttgaatccaccagaggagggagggtcgccagatggctggcagcacaaggctgggaccgtgaggccacacgcatcttgatgcggctgtgcgtatttcgggatgccctgccacagggagctcccacttcacccggcctgtctaacctggtcaataggagactcgacgagcgtctggacggactcgctcgtcgaacaggtggggtttatacccggtacggcgacgacctcgccttttcatggcctgatgaacggctacccggcggctttactgcctctgtggaggacgtactggcaagatccgggtatgaggtgcagccacgcaagggttggagagtgggtgccgccagagacggattcgagatagtcggactggtgctcgcaggcgatgggagagttcgcgtacccagggcccttaggtggagagccgctctgttgaggtggagggccgcattggttggggatccggcaactaccagacgggcacgtggactggcgggatacctcaaaatggtggatcgcgctccccgcaccagatga

SEQ ID NO: 14045 - RNA, 906 nt, synthetic construct
  source 1..906: mol_type = other RNA
atggacctgaatcccggagagctcttgactagactgcttccgaactgcctgctcggccaagctgctacaccaagcgcgcagcggcttgccgacttgctgggtatcgacgtgcgagaacttccagccgtgcgcctcggtcctcggtatcactaccggccttttaccattcgaaagcctgacgggcgcgaacgaaggctactggccccttcacccgccctgaaggtgctgcagagacgtctcctggatagatatctggccgccttaccactacacgccgctgcaaccgcattccatgcaggcgcaagcaacgtcctgaatgctcgccgacatgcacacggacgcctgatagccacagtggacgttcgagacttttttgaatctacacgcgctgcccgcgtgagggctttctttgttcgtcagggttggcacgatgcagagttacatacgctgatgagactgtgcgtctaccgcaatggcttaccacagggggcccccactagcccttgtctgtccaacctcgtaaacagacccctggatgagcggctggagaatctcgctaggaggatgcaagcgacctacactaggtacgctgatgaccttacattcagttgggacagggatcatttgcccgatggcttccgtcccgcagtggaggatgccttgcacgcagccggctatgaagtccagcccgccaaaggctggcggatccatgggattggagacaggccagtagtgaccggccttgttctcgcgggaaacggacgggtctacgtgccgtggagtctaagatggagactctggcggtggagatggcaggcttggtggtctggggatgcgtccgctcctcttcggttgcacgggctggaatcatatgtcaggtcctgtgccgcagtgccagaggcctga

SEQ ID NO: 14046 - RNA, 1197 nt, synthetic construct
  source 1..1197: mol_type = other RNA
atggagcatctcctctctcggttcattccgcggagtctccgaaatctcctcccacgccaatcaagcccctctgttagtgcaatggaaatgcgtctggtgggactgcttggagtatggccctccgaattcagcacaatccgcctgggcaggaaataccactacaggccctttagcgttactaaacgagacggtcgcgagaggcgaatcttggcaccttctccacccctcaaaaagctgcagcggatgttgttgcacaggtatctggacacccttcccgtgcatccagccgcgatggcctttcggcgaggctgttcaatcgtggataacgcccagagacatgcagggcagaagctggtagctaccctggatttggttgactttttcgagtctacaactgccgaccgcgtgcgtggtttttttctgaagcaaggatggcatggagaggctcttagcatgctcatgagattgtgcgtgtataggaatggcttaccacagggggcacctacgtcccctgcgctttctaatctggtcaactatgagatggatgagcggattgccgatttagctcggcgggctgacgccgtgtatacccgttacggggatgatctaaccttcagctggaggacagaacacatccccgcctactttgtccccgccctggtttccatactcactgacgctggatatgctatacagcctagaaaaccatggagggtgaggcccatgtccgacgaaccaaaagtgacaggtctggtcctgggtcggaatggcagaattcgggcgccactgaacctacagtgggaggtcgtgaagttgagatggcacctcttctggcactcaggagatgcccacgcacgcgctagacttcaggggtaccaagcctttttacaagcacttgaagtcaagtacgataaccacaatcatatcaactggcctgacaatctgcctggcctgcgatgggagatcttcaagctgagatggaggctgctgttaagacctggcgactccgacgccagaagtcgcctcgctgggtaccagagtctgctgtactattaccaggctaaccgcaagaatagcgcctcaacctatcgctacatttcggaaggcaatgatgactacaacgattatgacgacgaggatgactatgatgatttcgaggattacgacaacgacgatctagacgaacttccgttctga

SEQ ID NO: 14047 - RNA, 903 nt, synthetic construct
  source 1..903: mol_type = other RNA
atgcataatcctcttgcccattttgtgccacggtgcttgagggaacttctctccattccatcaacacaagctagtgagtgggaagctcagttggcatattggctccaagttccagtcggtgagctccctaacattcggatggggccgaggtaccactatcgacccttcagcatcactaaaagggatggaagagagcggagaattctggccccttccccggcgcttaaacagctacagcacagactgctgcacaactacctgtacacgttgcctgtccatcccgctgcaaccgcatttcaaagaggctgtagcatcatggacaatgccaggcgtcacgccggacagaccctgatcgccaccctggatctcgtcgattttttcgaatctacaactgcagatcgcgtgcgcaggtttttcgtgcgccagggatggagggggaaggaactcgcggtgctaatgcggctgtgcgtatatcgagacggtcttccccaaggcgccccaacatccccatgtctcagcaatctggttaactacgacctggacgagcagatggcctctctcgctcagcgggcggatgctatctacacaagatatggcgatgatctgaccttctcatggagaaacgaccgagtgccggcttatttcgagcccaagctgagaggcatcctgactgacgcaggatacgccattcagcctcgtaaagcctggcacatacagcacatcaatgctggcccccagataacggggttggtgctgggtcatgacggccgcatccagattccccggcggttatactgggaggcattcaagctgcgctggcgattatggtggcgtccagaccctcatactgccgcccgcttacaggggtatgaaagtttttttaacacccccgggcttaggtga

SEQ ID NO: 14048 - RNA, 906 nt, synthetic construct
  source 1..906: mol_type = other RNA
atggtcaagtactcttggcaaaaaattctcagggatatccttcctcagaaaaacattatggctgctaatactgatgacacaaaccttgaaatgctgtcttcgatctttgctatccggattgacattttacaagaagtgagccggagcattcaccgtcattatacgacattcgagataagtaagaagaatggaggcacaagaaacatctatgccccgaatcctaccttaaagaaagttcagtatgagatcttccattacttgcagaacttcgcaatccaccccacagccacagccttcattcctggcggttccatcatcgtaaatgccagacagcacctgaatcaggaactcttcctaaccgtggacatcaaagatttctttactaacaccagtaccaagagggtgcggaatttttttcgcgatcagggctgggagaagcagagcctcgatatgctggtttccctctgcacttaccaaggtgggcttccccaaggagcccccagtagtcctcagttgtctaacgtgataaacatggaactggatgaggagatttaccaagcagcatccgcgtcctctgccacctatactagatacggcgacgacataacgtttagctggtcaacttcttgcatggatagcgggctaaaaaacaaagtcacccagatactgaccaatttcggctacgagatcagcccacagaaagggtggcagctgttttgtgcagagcagcagcccgagatcgtgggagtagttatgggctcagacggaaagctgagggtgccacagcgaattcacgagaagttggacaagctgcatcaaaagaacaatccagacctgcaggggcagatacgcggttatgaaaactacattaaaggggtggaatccgcttcagtctcaatcgcgtga

SEQ ID NO: 14049 - RNA, 960 nt, synthetic construct
  source 1..960: mol_type = other RNA
atgggcctgtttgattttatcgggaagttccttgggacatctgccccggagacagcaagcaccaaagctgcaagcaatgccccagcctccccctacgccaaccagaattactatattaagaaggctgtgtacctaaagtattatttgggacagaacgagaaccaattgaaagagttccgacctgaatacaatacgtttcaaatccccaagcgttccgggggtgcacggactattaacgagccaaaacccgaaacaaaggcgctccagcacaagatcctcagaatgctcaggaatggcaatacgcataaatgcgcagtgggcttcagaaggggcagaggcatcgtgcacaacgccatacctcacgtaggcaaagccgtggttctcaaaatggacatccgtaacttctttccaagtgtcacgcgagaaaaatgcgttaccgccattatgcagactggctgggagaagggggctgctgaaatcctggctgatatttgttgcctgaacggaggactgccccaaggggcaccaactagccccttattgtcaaacatcgccaacacccgcctagactgtagactctacgggctggccaaaaagctgtctactggtacccagaaggtggattatacccgctacgcggatgacataactttctcctttgctacagacgaacctggtcttgtgaggggagtgattacactgattttccaaatactgcatgaggaaggctaccaggtcaataaaaagaagactagagtcatgcggcagcatcaaaggcagacagtcaccggtctggtcgtgaatgaaacaatcaatataccgcgcaaacagcggcgcaaaatcagggcggccatgcaccggatttcagtaggagaagagcctacccttaccaacgagcagcttcaggggtggatgggaatgttaagtctggttcagaagggcaaggaggagtatctgtga

SEQ ID NO: 14050 - RNA, 972 nt, synthetic construct
  source 1..972: mol_type = other RNA
atgaattggctgtcccagcttactcgaggattgcggcgagaacggacaccggccgatttagctcgctggcttggcctgccggaagccgaacttagaccatggctggctagtggacctgcatgggccagaggctacgagtatcgacggtttaccattcccaaaaggaggggcggtgtacgggtgattgacgcgcccaccgagaagctcaaagacctgcagagacgtgttctcaggcgcttgttggccccgttagccccacacgctgcagcaactgggtttcgccgcgggcactcaatcgtggacaacgctcggccacatactgggcaggccgtggtgatcaacctagatctggcggattttttcccttcaatcgccgctgcacgggtcgacgcactcttcagggctgtgggctggaatgctgaggcagcccggatcctgaccgcgatatgtaccctcgatggcgcccttccacaaggtgcgcccactagccctgccctgtcgaacctcgtgtgcagacggctggatgccagactcgccgcattagcccgctcccaaggaggtgcttatacgcgctacgcagacgacctgacgttttcttttccagcgttcggccgcaatagacgcctgaggagacatgccggaagacctacacccggtaggaggcccgctccttcttgggtcaccccacgtagcctgctcggatgggtgagagcaattttggaggctgaggggttcagaatacagttcaagaagcaggttagagtacagcgcccccatcaaaggcagacagccaccgggctagttgtgaatcaggccgtcaacctgccccgagctacacgtaggctgatccgcgccatgcaacaccacgagaggctgggacggttagatgccgcaggacgtcggcgattacgagggcttgaagccctggcaggtatggtcgctaggcagcgggaagagcctcagcgaagatga

SEQ ID NO: 14051 - RNA, 960 nt, synthetic construct
  source 1..960: mol_type = other RNA
atgtctctgttcaactggattaagcaggcattgggcagggcacgctctcctgcagacctagcccgatggctgcagcttccagaagccgaattgagactgtggctagaccaacggcccgcttggacacggggttacgaatacagaagtttcactctgcctaagaagaggggcgggacgcgagtaatagatgccccgacggagaagttaaaagctctgcagcaccgcatcctccgccgactgctcaacccacttaggcctcaccctgcagccaccggttttgtgccaggcttgtcaattgtcgataacgccagaccccacgctggacagggcgtagttatcaatctcgatttggagaactttttccccagcatcactcccgctcgtgtggaagcggtgtttcgcgcgcatgggtgggatgcagaggcagctcggatactgaccgcgatttgcacctatgagaatgcactgccccaaggagccccgacttccccagcactcagcaatctcgtgtgtcgcaaacttgacgcgcggctcgccgctttagccgagtatttcgacggcgcatatacaaggtacgccgatgacctgacactgtcgtttccctcctttggccggaacagaaggttacgtcggcacgctggacgtcctactcccggttggcgtcctaaaccagggcccgctgccccaagaaccttgctgacctgggttcgggccatcctcgaggccgaaggtttccggattcagctgaaaaagaaggtgcgcgtgcaaagacctcatcagcgccagaccgccacagggctggttgtcaatgaagtggtcaatcttccaagagctgtcaggagacgaatccgggctatgcagcacagggagcgactgggccaacttgacgaggccggaaggcagaggctaagagggtgggaagccctggctcatatggtggccaaccagcgcgagggatga

SEQ ID NO: 14052 - RNA, 972 nt, synthetic construct
  source 1..972: mol_type = other RNA
atgaatttcctcaaggcgttcggccgcttagggggtcgcgaaagaggcttggcagagttagccaggtggctgggcctgccagaaacggagcttcgaccgtggctgtctagcgctcctgcttgggcccgaggatacgactacacacggtttaccatcccaaaacggaggggaggggcaaggactatcgatgctcccggggataagctgaaggcgttgcaacggagagtgcaccagcgtctgctggctggcctaaaactgaatcctgctgcaaccggctacgtccgcgggagatctattgtagacaacgcacggccccatacacagcaggctgtggtcattaatgtagatctagcagacttctttccctcaataactgccgaccgggttaaagcggtttggagggcacacggatggaatgacgaagccgcgaccgccttgacgcacatctgcaccctggacggtagattgccacaaggggccccgacttcccctgctctcagcaacctggtgtgtaggcggttggataaacggctctccgagctagcaagacgctgcgccggagcatataccaggtatgctgatgacctcaccctttccctccccagtctggggagaaatcgacggaggcgtcctggtcctccacgtagcggaccagcccaacctcgcttagcccaacgcgccagacatagtaggaagatcataacacagctgcgcgagattattgaggccgaaggctttagaatccagtggaaaaagcggctccgcctccagcgggctcatcaaaggcagacagccacaggcctggtcgtgaacgccgttgtgaaccttccccgggccactcgcaggcttatccgagctatgcagcaccgagatcgacttggtcagctcgacgaggccggcaggagaagactgcagggactggtgaacctgcagcagatggtgctgaagcagcgtaactcaactggcagatga

SEQ ID NO: 14053 - RNA, 1047 nt, synthetic construct
  source 1..1047: mol_type = other RNA
atgcttcgccggcctggaacagctgcagctgccgaagtaggcctgcttgactacgtgcagcaggccgagctgcctgggttcctcatgcccgtcttcgcgagcctgaatcgcctgctgaaacgcgcgcgctcaccgaaggacctagcaaggtggctcgacgttccagagggggagctgagaggttggctgtccggtccagctccatgggctcgtggctatgactacgatcactttactatagccaaaaggcgggggggaacgcgcactattgatgccccaggcgacaagctgaaggtactgcaacggcgagtcctccaccgcctattgggacccttacccgcccgtcccgaagcaacaggctttgtgcgggggcggtcaattgtcgataatgctcgaccccacgtggggcagggcgttgttgtcaactttgacctcgccgattttttcccgtccatcaccgctaatcgcgttgaggctgcatggcgcgctttgggttgggacgcagaagccgccacaatccttaccaggatctgcactctcgatggaaggctaccccagggcgcacctaccagtcctgccttgtctaacctggtgtgtagaaggttagacgctaggctgggtgctctggcgcgatctcttcggggccagtatacgaggtacgcggacgatctgacattcagctttcctggcttggggcggaaccgtagaagacgacctggccctccgagaagcggtccagcaagacgacggccaaggggacccagtaggagagtgctggccaccgtgagagacatagtgatggccgagggattcgctattcagtggaagaaaagagtgcgaatccagcgggcacatcaacggcagactgccaccgggttggtgattaatcgcaaggtgaacctcccacgagccacccgcagactgatcagggccatgcaacatcgtagacgcctcgggagactcgatgatgcaggacgtcggaggttaaggggccttgaagcccttgccgccatggtcgatcggcagagagcggcacccggaaggtga

SEQ ID NO: 14054 - RNA, 954 nt, synthetic construct
  source 1..954: mol_type = other RNA
atgaacctgtttaagagcttgtttaacactgtgtcaggggggcgtagtccggcagatttagctaaatggctggatcttcccgaggcagaactgcgggaatggctcaccaataagccagcctgggcacggggttatgagtacgcgcgcttttctattccgaagcgtaggggcggcgttagggctatcgaagcccctaataagaaactaaaagccctgcagcggcggatacttcgcagactgcttaaccctctgaagtttcatcctgcagccacaggattcgtccccggacgctcaattgtggacaacgcgcgtcctcatgccggtaggggggtagtgatcaacattgacctcgccgagttcttccctacaatcacagcagagagagtgacccaggtgttccgaagtttgggctggggcgccgaagcagctaccatcctcactaacatctgcgcctatgagggacgcttaccacagggagcccccacatccccggctctttctaatctgatatgtcgcaagctggacgagcgattcagcgcactcgtaaaacggtataagggccagtacacccggtacgctgatgatattactttctcctttcccgggctggggcgaaataagaggttaaggcccaaacccaagggacgaccaccactggcgcgacctgctcagggtggaccaggtaggactcttttgacactgatcaaaactatcgtggaagaggagggctttcgcatacagatgaagaaaaaggtgcgcgtccaaagaccccaccagagacaaacggctacgggcttggtcgttaatagacaggtcaatctcccaaggaccacccggcggctcattagagccatgcagcacagacaaaggctagatcagctggacgccgaaggccaaagacgcctcaaagggctggaggctctgatggacatggttagcaggcagagaggctga

SEQ ID NO: 14055 - RNA, 1011 nt, synthetic construct
  source 1..1011: mol_type = other RNA
atggttcagaacgcagataggaaaaaagccgggagagcagtacggcgagagtatccagtcgtgggtgtttttaagtcaatagctcgtattctcgaccgtggccgcggacctgataaactagccgcctggctcggactacggcaggatgaggtcgaagcctgggcgcaaggtaggccaccagaaccctctggccgggagttctactacaataggttcactatccctaagcgggatgggaggacccgcgaaattgatgcccccagtgatgctctgaagtccatgcagcggcgggtgctccaccgcttacttaatccgctgccagccgcagcagaaagtacaggctttgttagaggcagaagcgtcgtgcacaacgcccaaccccacacggaccaggacgtcgtgatcaacattgaccttgagaacttctttccatccattaccgcccaacaggtgcgagcgagccttgtggcctgtgggtggtcaaacacatccgctgacatattaactaacatctgcacataccagggacgactgcctcagggatccccgacaagtccccctctgtctaatatggttgcccgcaggctcgacgcaaggcttgcaggtctggtgaaaggttatgatggccactataccagatacgctgacgatatgactttcagctttcccgctttcggggcagcgctcgactggaaagccagcaccgccgtaaagcaggccagatgcaagctgctgtcaatgatccagatgattatagaggaagaagggttcaagatccagaggaagaagagaattcgcatccagcgggctcatcaaagacagaccgccacgggactggtggtcaattctcgcgtgaatctgccccgagagtttagaaggcgaatccgtgccgctgagcatcgcgagaagttggggaaactgtcggctgaggacaaagctcggttgagaggctggcaatcctggagggctatggtgtctcatcagggcgcacaggcggcaagccctccttga

SEQ ID NO: 14056 - RNA, 2376 nt, synthetic construct
  source 1..2376: mol_type = other RNA
gctgccaagctcgccgggctccccgaagatatagcccgggaggatgtgtccatcgcaggactagacggcctgagactgagctggggggagacgctgttcgcaccagacttagcagccataacacctctgactgaccaggcagggcgctttgcaggcagcgtgttgggttgcgaggctcctgcatggtgttttctccctgtgggtagaatggccacacggctgcggttcagtagcgagctcgagtccatgcctgaatcgatgagacgacaactcgccgacgcctatattgagactcacccgcaaaaggtcgcaccaggccagggaggaatgcactggctgacggctaagagttttgagtgccccgagtgggaggacttatgcgccctccagactagtaaaccaacccccgagctgctgcaagcaatggccaataccagacaacgccgagccgtgaaggaagccatgcggtatctgagactgttccgggatcgcaattacgagaactgtgttacgcgcttcatgggcacagaactctggcggaaggctggcggggttaggctacaccaggatctggctgaagatttggagaaatttctcggaatgcctggggccgtgctgagtgcacctgaaaggcagaggttcgcggctgcggcgattctggatgcggaggacagggaggagctggcaagaaatttttctcgccttatcggatcacgcgtacccgctgagttcgtgttggagcacgtgtgtgcaggcggcaggaaggacgccgtacagctcctactggacagtgccccggacgccatccgtaggagatatattatcgatttcatcgggactcacttgtgggaacgggccggaggagcttcgctacacgaggacttcgcacaggatctggcccaggctctggccagtccctccagacagctggctgagtctgaattatgtcggatggcactgaggatggctgacgaacgccatgacgccagcttggtagccgctgtgttgcccgctctgacccgtagcgataagacctgggcggccgcagagcaaggcgttgaaacacccctgttggtcgaggccgtcagggccattgacgagtccgacattctggaccgggtcctctcttttgcaaaacagccggatatcgagctcgctgcccacgacgccctgcttcagtttcttatgttcgacgaagaaatcctcgaggaacatctttggagggccgagcatcggtgctctgcaaaacgactaccagaatgcgagacgacactcgctcagcttaccgcaatcgccattcgagaacatgggaacttgcgccgcatggcccgacttctgtccgctcatgcagaaaagtgcggtcttaaggggcggcaagcggaagggttagttgcccaggccttacgatctgctgcaaggctggtgtcacggcatggacggcatagggctgctgccctggaacttctctcttgcattggcttagagtgcgctacagctttgaaatacgtgctggccaatctggataggaaggctggctctggccgcgagctggatcacgtctaccatctgtgggaactacccaagaagtccggcgggaaacgaaccatttgcgcccctccaatgccattaaagatcgttcagagagccattcttcaccgtcttctcgagccactgggagcacacaaagccgcttacggattcgtgcctgggagaagcatcggtcagaatgctgcactccacgtaggtagcgaagtggtggcgaacacagatattagcagctgttttccttccgtgaggtggcagttggttctgggggtcctccgtcgggacttggggaaaactctgctgtcaggaaccgtgtcactggttaccgacatctgtactggtcagggcggcctacctactggcgcaccaacctccccggctatactgaaccgtgtcctgctgaaaaccgacgagatacttacagcagccgcagctcgtcgaggttgtacttactctagatatgccgacgatctcacattctccggcggccgaggcgcggttgaaatgcttggtgtcgcccgctcaaccttagagcggatcggactgaagttggatcccaagaagacaaacatctttaggaggggcagacgccagacttgtaccggtctggtggtaaacgataaagtggcggtgccaagagccatacgcagaaggcttcgtgccgccgtgcacgctgtcgaacaaggacgcgaacccgcctggcatggacgggaagataccgtggctgccttgggcgggagactcaattttcttgcatcagtccagccagagaaagctgcgcccctcaaggagagactggcgagagcgctccacggagggaaagataggtga

SEQ ID NO: 14057 - RNA, 3327 nt, synthetic construct
  source 1..3327: mol_type = other RNA
atgactgccaacggggaggcacggttcgccgaagtcatcaaggcttttccaaccctgagtgaggctgaggtgttgagattgagttacgccttctttaaatctgagcccgagaatcaggcaattctcctgagtatcgctaaacggggtgcactagctagcgtagcccaagacatcgaggcccagtatccccctagctctgaggctgccacctacttgcttaaaggggaaaccctggtgcttccgggcttttgcactgccctgccaacagaaatacagctgcggtacctgctcgcgaagtgggcccattctagcacgcccaatgtgctgcagttagtccagaagttatcctcttttaagggcctaaaaagcttgatgctccaagccgagctgcaggtgctggtcggttacctcaaggcacactcgatttgggtgacgaagtgtgagcctgaggccactctcttgctccccaaggatttgatctccgggtttatgcatggagatgtggctgacgagtttttcctgggcgggagcgcgctgcaacatctggaggacttagctaattgcggactgcggtctattctagtatcagtgaataacgcctgggaaaaactcgaattcgacaagttaaacgaactcttcgaaagggttccaaatgcacttatcgatcacccgttgcagccggatctgcaagctgccctgaagaagagaatgatctcaagtagcaaacatacactggccaaaaggttgaagaggaagaaaaaccagacttggaactttatggatcagcgggtcgctaccgcactctctcatctgctggggttcaaagttccccggtgggccatcggtgatcacgaggctttcagccagattctcgtagaccaaaatctgctccagtgtttcgatgatcgccagctgcagaagctgatcaacgagatcggtatgcccgtgatgacagcgtgcgctgcgcaatctgcaacacagaaactggtcaaaaactatcctgaagcctacgcccctctgcctttgtctactatttggcgtgctgtcaatagagaagatatgttcaaggtggttggctggccaaaaatcaccctcgagtccctgaccttagctttaaatgcaggaatcgcccagcagaagctagtatggctgtcaggatacatgaaggccgtggatgctagtcagaaggaggcaattcagacacttttactgaccaagcatcttaaactcgctgcacgagtgattgaatcaaccgacccttgttggctgcaggtgccaattaaggcttgcgtcgagaatggcctttggagcgtggtccttcaggccgacgccaagagggtcatggatgaggtcccacggcgtttcctggtcgataaagtcctggggaactgtagaaggaaggccttctctagagatcctttcgaccgcatttatgacgaccagctccttgaggcctaccgggctctgacatcgaacactgctttacgaaggcacttcgtaacctctctgctcgagagatcctggtgcacagaccacaaagggaccggctacctcatactgggcggacgacgcttttcatatgtggcgttggcaactgagctgctgaggtgtaccgcatttgtcggagatcgcgactatagaaaggaagtggtcgtgcaaggccttaaatccgccaagtcacaatcccaccggcagactctgctgaggctgatacaacaagacgttatcgagactgacatgcccgaggcctggattaaagccgtgctctcgtggcccaaagaggttctgaagacactcctccctaagatgactggaaagttgctggacgcatacgtggatcgagtgggtgtaagaggcctgaatgcatgctacgcgacaagtcccaaggccctttcatccagacactttttcgccctgcgcgttactcgccttaaaaagggcggcgtgtggccagaagaccgcctattgaagagggacgaccacggctacgacgaggtgatagaaactgcgagcaatttcctcggcataagggaagccagatgtctggacatgtgcctcgagcgcatggcagataaaggagaagccgtgctgcagtatttgtgtgaacatgccaaagacgttatgagtcatgagctcacccggtgggttgatgtggttcttgccagatacgcaattgccccagaagccagactgaaagctctaaccagcgatgtgacgaccgcagatgtgaaattctggcctcagcagggtccggatggcgacgaaggtgatgtctacgcgtatttgcgggtacaccacagtttgaaggctctgagcgaagtctggtcagcccgaggtgtggtgccagataacgtgaggacaattatggccagcaagtggcccaacgatgctgcatggtttgagttaatgctcgtgctagggccttcatatgtgtccctcatccgccaggtaatgggaatgatggattttaaggctccatttgggtctagattcgacgcccattataggcactccaccatccctaaaaagtccggaggcgtgagagacatctacgcgcccgaacgggccctaaaggcccttcagacccttataaacgttaagttactgcaacccctcggtgctcacgatgccgcctttgggtttgtgcccggcaggaacatcaccgggaacgcggagcgtcatgttgggcagagcatcgttacaacggccgacatccactcctgtttcccaagcgtgggccgaggtctagtcgtccacgcactgaaacgggatctcggagaacggttgtcatatggagcaatacttaaaatcgctgacatttgtctctcccagggagtcctgcctacaggtgctcctacatcccccgcattgctcaatcgtgtccttctgagaactgacgagctgttaacagacgcggcaaccagtaaggggtgtacctatacacggtacgccgacgacattacattcagcggcggcgagggggcagttaatctgctgggcgtggctaagggggtgctgaagccgattggactgatgttggaccccaaaaaaaccaatgtttttcggcgtggcaggcgccaatgctgcactggacttgtggtcaacgaccgcgtgtccgtgaaccgagaaaagtgccgcagactccgagccgctgttcatgctctggagatggggaggccacttttgtgggatggcaaaccagaaaccgtggcacagctgcgcgggaggcttgcttttctggcgtctgtaaaagctgaggagggagcacgactgatggcccgcctagaagctgccctgcgtcagaagacgacggtatgcgcacagtga

SEQ ID NO: 14058 - RNA, 3681 nt, synthetic construct
  source 1..3681: mol_type = other RNA
atgaaaaatttccgccaggccaaagacgagtcttccttttctctagagattcgggacgccgtgaatagtctggattttgctattcccagggcactacccaggggcgatccatttgcgcctagcgtgcccgaggagtactggaagaagatccgctccgccgttgaacagttgtggcccgcacgggttcggcccttgtttaaaggaaaggatgaggcccgcgcttatcaggaggcctggatctcagctgcgtattctcctttctgggactgtctgcgaatctccgcgttgtggtgtgcgggccaacctggcaggcaagctctgctagaagcagtaagacaggcagatgcagtccctagacagtatccccctgccgcttccccccttctgaaagcggtggaaagggggccgcacaatccctacctggacgaggaatctgccctggataagtacagagaggtctttcctatagggagtttcaccccacctattgacacgtgtatgaagttaggacgcctcgtcgtagaaagcagacggaagcgaccagcctgcgtgtctgcatgggacgtctttcgctgcctccctccaacactgccacacctgtcatgtaggtggctcacaagaacgcttcttgggttcgccgatgcgtgtgccagactcgggatacgaattaagaaaatccctgctgcatgtgccgcctttttgggtcgagacgccagcattgccatcaggagtcccgcagtgcgtagtttttttctcctaccaccaaaaaaagacttttctattgatgtgcgggccccagctggtatgacactgctgggatatttgttttacgccttctccaaaacaggtgagtacgaggccgtgttcatcgtgtccgagagcctgcttcgggcattttctggcgagccaaagctgctgaggaggttcaaggagagccctgggtatcagctgttccttaaagccgccgttcaggaggagcccacacccaaagggaggcgcgattggctgggagaaagaagatccctggaaggcaatcccagggtgggcgctctgctccgacacctattcggcaaaattctgccgggctggaaccggagtggacaggcaagcttcctggtagaactggccaaaggagccagggctaactgctactttccgagggagtatcagcgtttcctgttactggtgagcagcgagcgtcagaagaggcggttggaggaaagtggccactggctgcagctgtttgacctggaagacggctgtagaaaaggagctgctaactggaaattcattctcctccaggagtcgtgggatactgtatggaacgccaaggatcggttgcaggaggagcttaccgcggagaaagacgccagcgcttacctgcgattcgtcgcgcgtcatcatccttccggcgacctctcactggacttctacaacaataaaaagatcaaggagcggtttatctatgacttccatggttcccccctttgggagaaggccgggggtgcttgtctggagccacaacaggcggaagcactgtgcttcgcctgggggtctgctagctttaggggtcgggccggaagtttagctccagcgctggaggaggtcgggccatattgcctggaggacctcctggctctgatgctaactcctgccgggttgaggcgctgtagaggtgctctcctgcgggttctccccagagcttccgcggatgcagttcgccatatcgccgacagatgcgaagagggtgatgtgctccgagccattgccctgcatggcccggaagaagctcgtgtgccagcagccctgcgagcttacgatcaactcgcacccggcaaagctgcagcattgggcaggaagctcttcctggcaggactgccagttcgcttagcgcccggatggctggacaggggatcatggagcgccgagaagctgttcttggccctctgcgagctctgcggcgatcctgatagggccgggctgagacaagcccttgaggcgtgtgctcccgaacccgctggatcaaggcggctgagcagaaaagcacgtctgatcgttgccagacttgcagcacgtgctgctcggcgctttgaaccaggtgaggctggagctgctccaggggctctgtcagctcgcgaagtcggactcgcagaatggctcctcagggaagccagatgctgtgcttggggggccgcctcttacaatggtccaggccagagcatcgcccctgcccttaacgagatcgggcccaattgccgcgaagatttgctcgcgcttatgttgactccagcaggcgtacgaaggggaggaggggcacttttgcgcgtattgcacaaggccccagcggaagcagtgctggaaattattgatcactgtaccgatgttgaggtgcttcaggctatcgccttgcacggccctaaggaggcccgtgttcctgcagccaggcaagcatttgaccgcctccgcccccagaaggcaatcgagcttgccaagaagtttttcttagccggactgccggttcggttagcctggggatgccgggacgtgaaatcttggacccgcgagaagctattcctggccctatgcgcttcttgcgacaagcgggacgctaacgagctgtgtgaggtcctggatgtatttgcacgatcgttccaggggcccgacgctgaagctgctgctagaggcaccctcgaagaagtggccagactggcagcaagggccggcagactcttagtaagcgccgaagcggggcttgtggccggattatggccaggcaagcaagcaaggatcgtgaaatggctgatttcggcaatggactggaaagccgctcctggttgccgcctccagaagtcttatcgccgtttccacatccctaagaagcatggcggcaagcggctgatttcagagcccattaagaagcttaaattcctacagagaggggtgctcgagaggcttatagccccgctgggagcacaccctgcagctatgggcttcgtggccggcaagagtatagccgacaacgcgtctgtccactcagggcaacccgtggttgcagtggccgacgtgcataactgcttcccgagtgtcgcctggccggtgctgtacagagttctcgagcgcgaccttggccctcggttaggagctccagcatgcgcactcatagccgatctttgcaccttggacggtggattacccatggggtccccggcatccccagccttactgaatagagtgctgtttaaagctgacgagatcctggcctccgaagcgaagcgcaaaggctgtcgttacaccagatatgccgacgatcttgctttttccggcggtgaaggtgccgtcggcttaatcgccagagccggcagtgtgttgtcagctgccggcctccgactggatcctaaaaaatcctcggtgtttcggagaggaaggcggcaggtggtcactggcctgacagtgaatgcgaaacccgacgtcagccgagattacaggcggcgcgtcagagcagcagctgatcggtggcgcaaggggctcgaaccttcatggctggggtgtcctgtcacccgagaacagctattggggcggatagccttcgtcaacatgactagcgccgaggaagctgtgaggttgcgaaagtggatgagagaaggagatcggctgcgcggtaaaaaggggaaggccgcttga

SEQ ID NO: 14059 - RNA, 3000 nt, synthetic construct
  source 1..3000: mol_type = other RNA
atgacagcaccagacccccgccaaaggagggctgaagacctctgtgctctgctggagcagcagggagcagatctgttcgcagcgcctaggatggccggattggacccatacgctcacgactttggcgcctgctggctgtccgagttcagtgccggcttagccccactctggccagcctgtctgagcctgtttgggcggcagctgcccaaacaggccgtgttgcagcagtgctggtctgtggctatggagcgccccctgtggttagggatgctgtatcgggcagcctgcgcggcaggcttatctcctgctgcgtcacccctgctgtgggctgaagcaagccggctcaaggccattaccgctgctagatggagaactgacgctatggcagttgcactcatggcggctgacgctgctgccgtagtggttcccgatctcggcccccaaacggccctgaaaggaagcctaaggctgcgctaccggttggcacacctttgtgcaacaggcgccgccctccagggactgatagacgctgcagcccaccagtcaggagtcactgattatcagcgcagagtggaactggcacgagccgtgcacggtgctcagtctgggggtaggaggtggcggccacttcgagaggtcgagtacctgctgctgactccgaaaagccgacagttggtgatcggaacgcctgccttgtggccccttcttctcggcgccgctttgcaaagactggcggccctcccagatcatctagctggtcgaatcgccgaacgtgattccctcagccgatggttggcttctatgatgctggccctgagggaaagacgcttggaccaggcaggggccgacattgcaagactggatgattccgccctcctgaggcagcttgtgctggtgttaagaagagagcaggcagggttgaggcgacttgatgctgacttcggcttagccactttacatgggagtgacgggagggcatgggcccctatggaggcagtagcccttgcccggctatcctccctttgtggccgcgcaatgccagtctggtgggccatgtcggccggtaaggtagctcagcagctcgccgttggcgccctccaaagtagtgagttgcctctccacgacctggtgctgctgcgtcgtggctggtgcgaagccgacgagctcttactcatagcggccggcaaaggagggctactccttgccgacgcagttggatggaggagcgcccctcttaccgatctcgtgcgcgtcgcaaatgagcccgggaagtttggcaatttcggcaggcaaaaactggccgacagactactcgccttgccagacgctcggccgtggcttctgtgcatggctggtcctcaggcacccgttttacgcgccttggcagaccgcgccatatcagattgcgcacagacttttgcgcgatcctgggggcggtttgtgtcttcttctattggcacgcccgaatggcagggtgtgatcgacgcggtgcaggatcagcctgggacatacccgctggtgttcatgtatggactcgcactcctggctgatggcagaacccccgtggcaccccaaggattcggacaggcaatgctggcctccctgtgcgtcgccgttggagatggggctgcaccactatcctcatctgccggattaccgggaccacttcccgagcaagcggcccaagctgctgccctaagcctgtcgacccaacgcctgttgcggcacctgttgcctgccgtactgcgctggctcgagttagacccccaggccaccgatggtctggtagacgagggcccagagcctctgctgatggcactggctgcgcatcctgaaagtcctctgcccctgctggatcgattacgtttcagtagcagacctgtactgcagagagccgcctggaggcagcgcttgcatagggtgtcctctctggacgacctccgtgatctcacactgcatctcccaccacaggtgggccttctgccgtggagaacccggtggcttagcctggctgccgatgacgctttgcagcgggcggtgactctcctagcctgtgccagacggaatggttggtggctccgggctttacacaagcacctaggggagcctctgtggttggatgggctgcagggggctatcacactgctgaaaggcagcgcagcgagagaagccgccatgctcgaacttgtccgtgctgtgggagcagaacttgcccccccgctgatggcagtgtttgcggctgctagacgatctgctgcccctgggcataagctcgatgcatcctatactcgctcactgcggcccaagaagagtggcggccaacgcgttatcttggcgcctgggagggcactgaagcgggtacagagggccgtcctggatcatctgctgctgccactggggagtcacgcttgcgcatgtggctttgtccccggccgatccatttgtgacaacgctgctcctcacgtgggacagccagtggttgtgaacgcagacgtcagcaactgcttcccgagcgtgaagtggcccctagttctgggagcccttcggagggatctgggccactccttggcccctgtcgctgtgtctatgctcgtcgacatttgtaccgctgagggtggccttccagtaggtgccccaacctcacctacacttcttaaccgtgtgttatggagatcagatgaggttctcgctcaggctgccgagcaacggggactgaggtacacacgttacgccgacgatttgaccttttcgggcagcgacaccgccgtccagatgcttggggtggctagacgcaccctagcgcagatcgggctcgctctcgatcccaagaaaacaaacatcttcaggcgcggacggcgccaaatggtgacaggtctggtggtcaatcagcaggtgtcagtcccacgacatattcgcagaaggttgagagccgccgttcaccgggtcgaacaaggcggtgttgcgcagtgggacggcgctgaacaaagcgctgccgcctga

SEQ ID NO: 14060 - RNA, 2934 nt, synthetic construct
  source 1..2934: mol_type = other RNA
atgctcgacgtgctcaagctcctgaatgcacagcaggatcgccttcgaacgaccctgacggaactcgaccccttagccccccagtttgccgagactgcttggcaggcgatagccgctctggctgaacctctgtggcagccgctgcggcagatggtggatacagagagggacgtgtacgtactgcaacaggcttgggctgtgtgctggaagagccggctgcatgttgcgctgctctaccgagcaggaatggcgaaccctgcgacgcgggaagaagctctgcgcctaaggggtataacactggagaggtggcaaaagccactatcccccaaggatgacgtgcggcagcatgatctcgtcgccttcctgatggctgctgacgaaaccgaagctggagtgcctcacctcggccgtaacgcgtattacaagggtagcatccgccttcggtacgccctggcccatgcctatcgctctggtgccgccttaccggcactcttgcacctcgccagcgtgcaggcatgcgttaccgcttaccagcgcaggatcgaattttcacgcgtcgttcagcagggcgctattgacggacggatgtggagaagactgggggcaactgagtacgctctgcttagcctgagcgcccaggagttactggtggacgccccagccacttggccacaagttctgctccgacctctgaacgacggaaacttcctccagctcgctgcccagttgacggaagagcgcaaacgcctcaacggcttgctgtcagacctcatgcatgctatcagaatgagacatctggggaaagccgatgctatcttagcccaagtccccgataccccactggcccacgcactgtcccagagattaaagcgagagccctggggtctagatgacgccatgacgcacccctctatgcgacccgcgttcggaccgtgggtccctatgagtaaagccagtctggcgcgcttaaggccctgggcaccacaagccttacccgcctggtggggactgagtgctaccgaggtcgcccaggctattgggtcaggcgagttagtgccccaagagccagccagcgctataacccggtatataactagacaggacctggctcccctccaaagaacctggaccagagacgagcagctaacaattatcaaggccggtgcaggaaacctactgccaatggcagccccagcatgggatgacgttccattgcacgagctggttcccactcttcaagccatgaggtttgggacacattctattctggcacggaggcttgctgcgttgcccgatgcttcagaatggatcgcattgatggccgacgctcctgacgccgatcatgcacggaagttacgagagctcgcccaggccgccattgacacctgttggcacggcaataggatttcctgttggtccgagtggatcgtgtcagcatggggctgcgcagggtgggacagagtgcaacagatcgccctggcgcacaccactccactaaaagcagcagtcgccatgttcgcgagttcacgcatgccactcctccctggggagttccaggcagtgttagctagatccctgcaccacgctgagttgttgcccccacgccctctgccttggattaggcggtggctttcttatgatcctcttgctgcaagagctcttacactgcatgccccgttgctgtggcttgaacggctcgcccgcaacgtggccactcctacacagactcttgacgcccttcttgcctgccagtatgagtcggtggtgcggatggcttggaggaataggctgaaacgagtgactaggacagaggaactggccgagctagccatgagacgaccaaagggagcgggacctgccggatctgtgtatagatggctccagctgcccggcgctgatagaaatgccacactggtactaatccaccggcatgatgtgcgcagactgcgtcttttgcacgaggagtggggctctaccactttcgatgccgcttgccagagcgcacagcagcagttgattagcagggcagacgctggtgaacctcaggctagacgggaagccgccatgctggagctgcagacccgtctcgggctggattttgcagaacatatgcatcaggtcctgatgctgttgacccgtgacgccccttccgggcacaaacttgatgcgtcctaccgttctttcgaaatccccaaaaggcactcaggcatgcgacgcatcagtgcgccccacgctagcgtgaaggctgctcagaggatagtactgaacgcacagccacacgtagggcagccagtcgtcgttaacgcagacatccgaaattgtttcccttcggtcagatggcagctggtacttggcacccttcgcagggagctcggcaggcaattgtccccgacagcaattagcctgttgacagacctgtgtacagcacagggggccttaccagtaggagccccgaccagtcctgctcttctgaatctggtgctgagacgcaccgatgaagtacttagccacgctgcgcaacgcgtcggtgcacagtacacaaggtacgcagacgatctcacatttagtggggatcacagagcagtgggactcctccggctggccaaaaggactctggggtgcatcggcctggagttggaccctaggaagactaatgtttttaggagaggcaggcgtcagatggtgaccggcctcgttgtcaatgatcgggtgtccgtccccagagcactccggaaacgtctgcgggcggtggtgcattccgccgaacaaggcattgcaccgcattggaacggacgcgcctgtgccgatgatctctctgacgttcgtggctggttggcctttatgggcctgttgcacgccccccaagctgcaagattgcgagcccggctaaatgccgctgccccactggatcaaggtgtgcgggacgcatattga

SEQ ID NO: 14061 - RNA, 1386 nt, synthetic construct
  source 1..1386: mol_type = other RNA
cggcgttggttgagctacgacccactagccgctcgagctctgaccctgcacgctcctctgctgtggcttgaaagactagcgcgaaacgttgcaactcccactcagaccttggatgcactgctggcctgccagtacgagtccgtagtccgcatggcctggcgcaacaggttgaaacgcgtgacaaggactgaggagctggctgaattagcaatgagaagacccaagggagcaggacccgcaggttccgtctataggtggctgcaactgccaggggcggacagaaacgccactctggtactcatccacaggcatgacgtgcgcaggcttcgattgctccatgaggagtggggctcgacgacatttgatgccgcttgccagtctgcgcagcaacagctgatatctcgagctgacgctggagaacctcaagccaggcgagaagcggccatgctggagctccagacacggctcggccttgacttcgccgaacacatgcaccaagtcttaatgctgctgaccagagatgcaccaagcggtcacaagctcgacgcaagttatcggtccttcgaaatccctaagaggcacagcggcatgcgccgcataagtgcccctcatgcttcagttaaagccgctcagaggatcgtactcgataagcttctgcagccccttggggctcatctggcagcctgtgggtttgttccgggccgcaacattgctcacaacgcccaaccccatgtcgggcaacccgtggtggtgaatgccgatattcggaattgctttcccaacgtgcgttggcagctggtgttaggaacactgcggcgcgaattgggccgccagctaagtccaacagccatcagcctcttaactgacctgtgtactgcccagggggccttgcctgttggtgctccaacgtcacctgctcttctaaatctggttctgcggagaaccgacgaggtgctgtcccacgccgcacagagagtcggtgcccagtacaccagatacgccgatgaccttaccttctctggcgaccaccgcgcggtgggtttgcttaggctcgcgaaaagaacactggggtgtatcggcctggagttggacccgcgaaagaccaatgtatttcggcggggaagaaggcagatggtcaccggcctcgtggtgaacgatcgtgtgtctgtgccaagagcactgaggaaacggctccgggcagtcgttcacagcgcagagcaggggattgccccccattggaatggccgtgcctgcgctgatgatctttcagatgtgcgtggatggttggccttcatgggactgctccatgcccctcaggcggccttactcagggccagactgaatgctgcagcaccactcgatcagggcgtgcgggacgcttattga

SEQ ID NO: 14062 - RNA, 1497 nt, synthetic construct
  source 1..1497: mol_type = other RNA
agcttcaggcaggtggtagcgcggagtctgcatcacattgagctgctgcccccccgacctatgctctatatcaagcgatggattgcccgcgatcctgcctccgcaactgcactcgcagatcatggccccgtacactgggtacagcggttggtcgcgaatacaacgaccccgctcgccgcccttgatgccttaatagcttccgaagggctccctgcccctctgagaaggttagcgtggagaaaccgcatcgccagaacgcgggacgcccaaactctcgcagaattatctgcccgcatgccagccaacacaggccattttgatcagctcaatcagtggatggtccagggaactcaggcctccacagcaatggcactcgtgctgaccgcacgcagagatgggcctaggctgctccaactccaccagaggttcggggatgaggtgtttatcaccgcctgtagggaagctgctcaactgctacgccagatggcccaggaccccactagcggtacgagacagtcaggccgacacgacgcagctgccctggaactgctgggtcaccttggcgctcaagcggcaccccacttgatgcccgccttggctttatgcaggagccagcagccggctggatgtaagctagacggcgcctacgcccaacatagaatacccaagaaaaatggcacactgcggcttatccatgcgccccacccagcactgcgaaaggctcaacggttgattctggaccagctcttagcccccctaggggcacatcctgcagtgtgcggatttgttgccgacagatccattgttcacaatgctctacctcacgtgggccaggccgtcgtggtgaatgcggacatcaagaattgtttcccctcagttcggtggccgcttgtccttggagctctgcggcgtgagctgggacactcactgagccccgctgctctgtccctgttggtggacttgtctaccgcaggaggtgctctgccagtaggtgcgcctacaagtccagctctgctgaacctggtgttgcggggcacagatgaaaccctccatagttctgcagagcgagcggggctcaggtacactcgttatgccgacgatctgacattctcaggcaacagtcaggctgtgggtctactgcgccttgccgaacgtactctggcccagatcgggctgacccttgaccctgccaaaaccaatgtgttccgccgtgggaggagacagatggttaccggattggtcgtgaacaaccaagtctctgttccaagggctgctcgcagaaggttacgggccgcagttcaccgcgtggagcttaaagagcagccacattggaacgggcagccacaatccatggcagctctgagaggcaggctcgcttttgtgtcgatggtctgcaaaccgcaagcccagccactggtggatcggctccagagagctcttgcccaggacgagcgacccgattctgagcctccaagcccacagggaagcttggcctga

SEQ ID NO: 14063 - RNA, 2466 nt, synthetic construct
  source 1..2466: mol_type = other RNA
atggccctcaggcctgccagaggtaatctgcctctgcccaccctagaggtcctaaggccaattctcctgaagagttttggcccccaaggaggtagacgctccttcctgaattccattccaagagtctctgggctggcgacatgcttggaagagggctttctgcaaggcctgagcccactgagccgcaccgaattcgatgagctaccgagcgccgtgaggagatggttcttgggatgtcctgcgcttgtttcagttggcttggacgaggggtttcgccgagatgtggccagtcaccccgactcccccgaaatggtagccctggagcactgggagcagaaagttctgccgaaagccctccatgcgatgcggtctggaatcctgtccgaagcagacggcttcccagcaggcttttttcggaatccactggcactgcgtcaacaggagccaatcagacaggccctccggtcacggaagcacttgtttgggccttctgccgacttcctcgggcaggaactgcctcaggccgccatcaggcgatttgaccctcgcaccaggcgcctgttacagtttcatggtgccagggcagaccagcggcttttggggggaccaggggatgacctcgaatccctgttacaacttgtgcgcgacacaaccgtggggcagcttgcagacgcaattcaccaatgttcatctgagggccccctcttagatctggtgcgactccaccccactgagcccgctgtcagggaagcaatggaaagagtgcttgggatcccaggcctgagatgggggttgctgcggatgctgggcagacctgtgctgcaagcagccggggaggatgcgctcgtatccatcttacgagccaaccccgatgtggtgacctgctgtgatgtcgagctcgctaacaggccggaattcggtagggccctcgtgcgatgctttaggagccgcgatggggctgctcgtgtgttgcacaggctgcccggtcgcgctgtttcagccttactttcggagacacaccctgtagtcggactagggggtgaaattgctcaggcgggggcacggagcagaaatcgaccgactcggtgcgctatcctggctctgttggttcgccacgcaccccgtttgatcgagggcacgtacgggtgggtcattccagctggcatccatcaggacgtggcacgcagggcactgtatcacagaagacatggtggactcggcgccctgttccggtttactgaccggaaaggacgccctcattggcaagagactgtgaggaagaccggagctacacctgccttgcgcagggtcctcagaagagacaggcccgacctgataccggagttgcataggtgggatgcattgcgggcgctgaaaacgccaggcttcaggcggcgactggtggcattcctcgaaggagatttcgaagtggacctcggtctggctccagccgctctgagacacctcgtgccttgggtccggaaacggtggattcgacagcccacagttgccctggcatacgaaatcgctcttgccctttcgccccgcgacgctagataccttctggccttgtgtacacagcgtgcaggaattgggctcatgcccccagggggcactgcattcgatagtctgtatagaacagtgcatataccaaaaaggagcggcggtacaagagcgctgcaggtgccgaatccgagcctgaagcggcttcagcggaggttccttgcccacggcttcgacgcaatccctctgcatgatgccgcccatggattccgtaagggacggtcaatcctttccaacgctgggccccacgccggaaaaccctgtgtggtgaacgtagatattgagggcttttttcccggcaccacctatagaaatatcttacgagcttgctctgagctcgcggatggagctcttagcccagctgccaggcacgtggttgccgatctttgctcttaccagggagccctaccaaccggtgctcctacgagtcccgccattggtaatattgtcctacgggcggccgacgccgccataagtaaggctgttcatcgcttcggcgtagcctacacccggtacgcggacgacctcaccttcagcggtggtactggctgtgtgggcgcattgcgttttgtcgagaaagtgctaggagaattaggctatcgcctgaacgctaagaagacgaacatatttcgacgcggcaggagacagatggtcactggcctggtagtcaaccaggcaccacacctgccccggcgtactagaagactgatccgcgctgcagctcacagagccgctacaggaggggaaattcagtggaacgggcgacctatgtcccgccctgagctcgagggccgtatagccttcctcaagatggtgcatccagaggaggccagggaactgctgggacggttaggcggcgatggagctcctggaggagttcctggcgggaaggggtctgcctga

SEQ ID NO: 14064 - RNA, 3114 nt, synthetic construct
  source 1..3114: mol_type = other RNA
atgggggtggaccctaaggtcgatagggccgcactggccctggctagctccaagatgcaagtcgacgtttcagccgccactcttaagctggaggatgaagcagtgtccgatgtagatgagatccacgcccggctagccgaaatccttatctccaacggaaccaacggccggcggcttagggaagaggctagagacttagcacgtgaccgacagcgctgttggcgtggtcgggctaagtcccgaggcataagcgtagatggatatgcccgcaacctcatcgccagtgcgccaagacattgcctttgcgaactgattttcgtgtacctggatgccgaaaaagcttcagaggaagggttttcaaaggaggtggccgaatatctgaagaggagtaggaccaggagatctaacctattccgacaacttctggagacaaacagggtaccgacttctggagcgctcctgcgggtgctcgagtttagcgcaggtaaaattacccctgtgttagccggggaggcttttgaaggaaagtgccccgagaaagaaatagccccacgtctctctgccctttatcagtacgctagatctccggaagaggcagatgctttttgtatgaaatttggccatgccgtctttgatcgagagaagttcgactctctgtctcggaagctgaaaagtcgcatactgagtcagaagaaactgtccaggcgtctcctgacctccgacttccgacgggaaattgaaaacgatcctctgtcccatccagatacacccgagagcttgcacctcgctgcaacgcctaaacggaaccgggaggcatttcgacggatcgcgagcggctcttggcaacacgaagaagttgaggaactgatcctgagcggagctgtccatcagttcgcgagcaggatcgacaaactgttagcccgcaaggcctcttgggtggagcactcacggtcatctgggaggtattcctgggacgccgagagcggctggaagacaaatcctttcgagttggtgagcagtcccactagtaagaccgtacgcgaagcgattgaagcaattcggcctcttgccctgcatgacgatttgttcatcctgcagctggagactttggatgaacgcgccaagtttcttggcgatttgccatccggacggaggcgacgcatttgtcaacgtctaggtgagaaaccctatcttgagatactggaaaaagccgtgggtctagatagaggactcgctgagaaattgctgcggtgccgtgagaaatctcgtgagacactgagagagcagtttatacctagaagaagctccgagacagctatgattgatctttggttggagtgctttgactcccaggaaattttccgcgagttttttaagctgaagcgcctccaaggccggtggaggaccgtcttagaatactttgtgcgcgcaccgtacacccacctggggacatggcgccagaaggaaaagaggggcaccaaagggccccttccgtcacgcttcctgaatgcagtcctggagagcggtggagactggagaactttccagacagtaatgactcggctcaaagccgaagacttggctagactggtcgagcacgcacctgaccggatgcttacatggttaaccggcatctcggagggcttatcgtccgggaatagaaaccaggagttcgcctgtttcttggatgctatggtgcccgccattccaaagcgcttaggagacgtgctaccaagggagatgagcgacactatgttccgaaccaccctggagaagttggccggcccaatcagaaggggcgtgctcacaccaagcggctatagatggctcctgaatcgcaatacgagaggtggagatcccgcatggctggagctactggaggccagcagagagcgcaatcttagtccctccgaggaccccgcacttcatgttctggctagcggcatcctggcattaggggggcgcgacaggttccgggttctgttcgaagcctatcccactctgtacttcggtgaagccctggagaggctcgacttgtggactgtagtgcgacagaccttcgaccacccatccctcgccagatggctggagaggaaaactgaaagatctaaactcgttgtgctgatacccaaagtacgccgggaatatagatcaagaccaacagtcgctgccgctctggaggtggcgcttcgattttcactcagcgatgctaggtacctaaagtggctggccctgaaacgttggcaggctagaccgtgcgctgagggaaccgcgtttgacgacctctatagaacgcatcgtctccctaaacgggcagggggaagtcgggttatcacagcacctgagccccgactcaagaggctgcagcgaagactgttaagaaacgggttcgacgagctcccccagcactcagcctctcacggattccgccaaggccgctcgatcgtgtcgaacgcggttgcccacacgggaagggagatggtggtcagggctgacattactagtttttttccttctactgggtacgcccacgtgctcagatcatgcaggttgttagcggacggccaattgagtgaaggggcagtgagactcgtcgccgaggtttgttgttacgctggtgcactaccaacgggcgctcctacaagccctgtcatcggcaatctggtgctgaagcctgtcgacgcttccttggaggcggccagtaaaaagctcggtattatctacacacgctacgctgacgacctggcattctctggggatgatggcacccagaagattctcccatttgtccgaaaagtgctgtccgattacgggtaccagtccgatccaaagaaagaacacattttccgccgaggacggaggcaagtggttaccggcttggttgtgaatgagaaggcacacgtgccaagacggatccgcaggcggcttagggctgcagtgcatcacgccagccacggaaagaatccccattggcatggccacaagatgaacgaaaccgagctcctagggagactcgccttcctgcagcaggcacatcccgaggaagcctcagaactgcgtacccagttgcagcagagggaacatcagcgggataggaagggtcaggaagaatga

SEQ ID NO: 14065 - RNA, 918 nt, synthetic construct
  source 1..918: mol_type = other RNA
atgagtgatttgcgggagatggaccacttgcgcgctattgcatgggccggtaggggagcaactaacttacaggctggctgtctgctggatagccgctacaggacctatgaactgccaaagagatcgggcggcgtcaggattataaccgcccctgacccaagactgaagcgtttgcagaggcggctcttagtcggcgcctttgaggctgttcctctccacgatgcggtccatgggtttcgctccgggcgatctattgccacaaacgccgctcggcacgtgggtcaacgactggtggtaaatgtggatatcgcaggcttcttccccaacaccaagttccaacaggtcttaagcgcgtgcaaaagagtggatggaggccgcctctctccttatgctgcccgtctgctggctgagatctgttgctacgcaggtgcgctccctactggggcaccaacctcacccgccgttgcgaacatcgtgctcagacccgcggacaccgccatagctaatgctgcagccacgcacgggatttcctacacaaggtacgccgatgacctgactttcagtggcgagggggacgctaagagaatcatcccgtttgtccgccgggtgctagctcaggccggatatcgcttggatcagcgtaaaacacagctatatagacgggggcggcagcagctggtgacaaatcttgttgtgaatgaacgggtgaacctgagacgctcagaccgccgaagacttcgggcagccgtacaccataggtgcgtgggacgacccgccgaatggcatggaagggccatggacgaccatgcactggagggccgtatcgcacttcttgccatggttgatagaaaagaagctgacctcctgctggccaggctcaggagccaagcatctggatggcgatcccgggacgcctga

SEQ ID NO: 14066 - RNA, 2823 nt, synthetic construct
  source 1..2823: mol_type = other RNA
atgagtagccggttttccctgccctctcttctgctgagttcaaatgaggacagctacttcgccttcctaagagccctgcctgtggagcagaatctgacaagccaggacatactggcgttgtgtaaaaaattagactggcgaagcctagattcagcgtccaagtgccaggccctgctgacccagctggttaaggatagctccgctgacttcgaggaactggcgcatgacattgacattagcagccagtctttttggcggaaccttctggcgtgctccgaagcttccacacggcctggcctacaatttcttatcgaggctaacgaagcctggggaaatgaggtgctgggcagtaatcaagcaaagatcatggacgacctaccagctaataaaattgtcaatgcactgatgaccctattagtggaccccgctcgtctgacctctacgcagcttggcttgatcgccccaagacagagggccgcatgccttcatcactatctcaggcagcgggtccccgccgctaggaaaaagaaaaacctggaactcctgcctattttccgaagtgcccgaaaaatttatggcccagaagccaatccccgagtggtgcttctcgcagtgcaacgggcccttattagacaatccctctccgcgaaaaaaattggtaagcgcgaattcctgatgctggacgacggcctgcaatccgcactgactgcttcccccgtgctgctggacagatttgtagcctcccagtatcggcacgtgctaatctctatgcggagacagatcgtgcgcgtgaagaaactgcccatattggacctcacccatacaatccagagtctcgagagcgggaatctgagtaacaaactgattccggcattagaattttggcgcttcgtaagacccgatttcagtaaactcgtggttaactctctcctgaaaatcgccgacacgtctgaaatcactcagagtacggcccttgctcagtggtgtggaacaacctcatatgacatgtcgatcgggtttctcagtgttctgtcagcatttgcaccgctggaaaagttcctcagttacccggataggacacggagagatattgcctataagatgaacgccaaactgttgctcttggtgttgagggcaggccccgtccctgagattggccatgtcgcaaaactggctgccaagaagccgggcatcctcagggcctggctgacagaatgggatcgctggcagaaagatgaggatatctcatacggaatgtccctcatgtctgaaatcattgctaacagtcggcaggtggatgtccactggcgagtgttagagcggcagatcgcctcgttacctctatcaaccttaagcattttcctttccagcgataattcgaaattccacaacgggacacgcaatcagtcacgtctgataaaactgatgttacagagctggcgccgtggtcaaaagcacgataatgctcagcgcctgctgaagatatgtcgccgccacgggcgcacgatattggaagtagcaggcgatagcctaaccgcaatggagatcagatgcatagccggttcaaagtacctcggcgagctccggaaaattatcgcaagccgtagccagaagattcctgggtggcggcaattcgtgactgtatcccttctcaaagcggaacgcgcaccttacctccttaatcggataatcgagggaaacccacacctggtcgccgaagccttccacgtgcgtcccgatttggtgaggtggaaagatgtggaattggtggaccctaacgacctagttcatgccgccactcactctaagaagtttgccagaaagctggaccttaggttgactgaccggcgacgtaggagcctcttaccagtcatcagggctctctatggcaataaacctcgctcctgtgcggcctacgagctggctatgctgacagagctgaagttgtctagaacatttgtgtcactcgcactgatgctggctcacgccaaccaagttcccgagggaaatactttcaacgcgttttacaagacatataagttgccaaagaagtctggggggagcaggaccataactgccccctccacaatgcttaaagccgtgcagagagggctgctgaagaaggccatcgccccaatggacaacagcccttctgcaacaggattcaggaagggatcatctattgtgaagaatgcgcaggaacacgttaatcagaaaatcgtcgtcaacgttgacattaccgcattttttccaaacacccgctactcgctgatcagacaagtggctgctcaggccgttgatgggcatttgagccccatcgctcaatggcttttggctgagatttgctcctatcagggagctctccctaccggtgcacccacttctcctgcagttggcaatatcgtcctcaagcgagccgatgcaaccatcgccaaggctgcagagcaccgacggattaagtacacccggtacgctgacgatctcactttttcaggtgaggatggagtcgttgatatacttccactcgtagtgagaaccttaggggcctgggggtacgagctggacaacaagaagaccaacatcttcagaaggggtaggcgccagatcgtaactggactggtggtcaacgagaaaccgaacatggctaagccattgagaaggaggcttagatctgccgtacatcgacgcctgtccggcagacagccctcttggcatggcaagccaatgagcgactcagagctgttgggtaggattgcgttcctcgcccagacgcagccagctgaggctaaaaagttaagggatcaactggaggctgtccagtga

SEQ ID NO: 14067 - RNA, 3984 nt, synthetic construct
  source 1..3984: mol_type = other RNA
atgctggtggtggtggaggtggctaaatggcggactcagaaagaagctaatatgctgaatgggtacaggcgccctaacagcatggcttcacagcaaggggagcagtgcattcagtcagtccccttctgtagcacactgcccaatattacatccggacttaagcactgggagatggactgtgtcagaccatctacttattttaagagcattgctctccagctgtggacagaactgcaaattgacaagaacttcgcaaaggaactgcagcgcaaccacaggtccgccaatggacttcagtgtgtgcgctacttgcacgccacagcaaaatcggacgctgatcgcgctctgacgtggttgtttgcgacccacctcctcccaagctggaagcttccacagcccatgctccctatgctgctggcccaactgcagcgggagtacaaagacgtggctttggtgcaggccattatgcgcatggcagatcagtctgttaaggccggagaggctggaagagcctttgaccacgagctggatcacgagttcgaccatgcgcccgaggcgctggtatttgtggattcagccgacgctcacctgtttctggaggccgctaataagaagtgctccgcggacgctccactctggatgtgcctgtcgacttgtgtacgaccggacagaaacgccgcaaacggcgcatgcgcatgcccatgccacgcactggagccactcagccagctgcggaggctctattctctgcttgcacgcgctcatcgtcgcgtccctcagggaaaaaacgccttcgaattggaaactttactatctgtgacagacctttcaactccgaaccctacggctcacgggccagtggacctgagacagacatcgcatgtggcgcacaaccgtatcgaccgatttggcctggatttcatcatcaatcaactgccttttgggtcagtgattgccggtcctctgaggcgagcaatgctggataccgtgttcctgggcgaatttgcccctttcctggattcaatagccaatgaggcaccccctgcgggccgaatgagacagctcaccgatcggcagatctcccacgcacactcactgcgggtgcgccataggaatgagtgggattctgctatcggtgctaccctggacttagttaccgctaggtccaccgacgccatacctgccgactctaatgccatccaggaagactgttggaatcacctccgcattgtggatgcaatcctgcatgaggctaacccccgccgcagaataggagagtatctaaggcggatcgttgccagagaagggccggcattgcagccagacgccgctactaagtgtcagcccacagagcctctgctggaagccatggagctcattggccgggcactcatcctgagggagctgcgatctacggtgggcggtccgaaaccactcacttctaccagcaccatgggcctgttggggcgttttgccatgcccagtgagtctattagcaactccctcaagctcaaccttccagaccctcccatcgctgcaaccccttctgcacctgaaggtccctggtacagaaggcaggcaaatgatcctaagcacactaatttggacagcattaagcattgtcttagatgcctctacggctgccggagcgatgccatcatgctatccattgcctctgtctttgacggacccactaaagcagttgcaatggccacttctggaaattggttgaaaccaggtgccctggctagatggatgcgtaccagttccataccttcttccaaccgttttgattttgtccgacagcttacgttgacccacggcgataaacttgataagctcttgcctatgttcgcccgcgaaaggacctgggacgaccatcggcccctgttcaaagggcagcaacgtccaactaacgcaacggagcaatggctcgtgcagagtatcgagttgccccccaagagtcttgccttattatcaccccgcgcccggaaggcctatctggcaaatttcatcagacggtacggcgacctggccacaaaattcctcgcaccgaatttccagtctagaatacagcgggaaaagaatggacagctggactttgctggcaatgccttaggaacagtggcgtgtgccgttaacgaactcccctggcggacagttcgagctgcccttcctctgcatgttattgaaacggttatctcggaatccaaattcggggccgctagagtccccgcaagtgtacctccatctgtgcccccctcagtgccacttgctgacgtcaagaagctgttctcttaccatggtgaatccgctctagtagtctgggcacgcgcgtggcaccgaatagtcagctcagctgctactacccaatccgggaaggcccgcgcaaccaaggccctaatccgcaatatcagcaagggaaagttcaacctgcaatgcttttgtgagctggcaagccagccgcccagtgcctcaaaaagtaagaagcggtttgtgtccgattttgccacaacaatcttggccatcccagctatcgtgcaggctctggtaagccaaagcaagagtctcgaccaaacctggttcctcctgcaaaacagcagaggacacgccttggccgatctcccccgaagccagcttgagaacttcgtgctgtccattgacagtgaccttagggacatttcagatggtcccccgggcgattccccagctgatgcaaagaaactgaaccggccttacaggaaggctctgcggtcgcctttgaattttgtggcccagtttgtggatgtgatagcaaggaggctgtgtacagtgtccgcaagcgacgatgccgccattaccgcacaaaaaattgatctggcccgcctcctgctaagggtaatcgctacccgggagcttagagcgccagctagtgttgaaaccatagagcttctgacacagcggctatcaactcgccgggacgctcagttaaccagaaaagccgcccaaggaaggtgcaaacccctgaaagagccagccgaggaaactaccgtgctcgctgtcgcactcgaacttgcaaaacagggcctggccgacgaattccagcaagtgttaatgatcacccggactgctagtctcgatgatcgatatcgtgcccacagaattcctaaaaaacgggggggaatgagggaaatccaccagccggatgctgatctaatgcgtttacagagaaaggtcttggcgcgctttctcgcacgcgctccaatcagtgagcatgcgcacggtttcgtcagaggcaggggcatactcacaaatgcgctggagcataccgggaaaagagtcgtgctgaatgtggatattcggaacttctttgggagcctcccaatcgaacatatcagggccgcgcttaaccagactagactgcgcagccaggtgccaaagacagagaaccaggggtgggccgtcagagacagggagagcctgtcaccagccgcgttggatgtactggttaaaatcgttacccgtgccggatctttacctcaaggcgcgccgacttccccagccatcacaaacattgccctgcgccacacagacggtatattggctaaagcatgcagaagaattggcgttagctatacgagatatgctgacgatcttactttctccggcgccgatggccccgttcaagggattgtcccattcgtacgggaactgctgacgaggatcggtctagagctacatcctgacaagacacatgtataccgaagcggccgacagcagttagtgacaggcttggtggtcaacagttggcccaatctacccagacgggataggaggcggatgcgtgcagctgcccataggctgggaaccaccggtaaggccctgaggtggaaagggtcccctatgtctttggccggcttccaggggaggttatccctccttaacatggtcgacgagagtcgagccgactccctcaggttattggcgaagatggaacccagatga

SEQ ID NO: 14068 - RNA, 954 nt, synthetic construct
  source 1..954: mol_type = other RNA
atgtcgactattacatcatttacactcccaacatctttgcaagcccttgcaccgggggtggggaaacggtaccatgtctaccctctagtcagcgggaacaataagaagaagaagcgatggatagaggcgcccgacagcgaactgaaagccgctcagagatggcttctggacaactggctgtatcacctcccacccaccggctttgcacacggattcgtgccgggtaggagcattctcacaaacgccgcggagcatgtcggtaggagatgggtcgtcactgccgacgtaagagatttctttccctcaataactgccggaagaatcgccacctgcctcgccgagctagaactggacgccgctgatcgctccactgtggtgcagctggttacgcgtaggggacgcttgcctcagggagctcctacgtccccacaccttgcaaatctagtggcccgtaccctggatctccggttgtctggcttggctcgccagcatgactggacctatactaggtatgctgatgacctgactttctcagcgggttccccaaccagtccagataccggaatgccccctcacgaattattatgggcaatcgaacgcatcgttagcgatgaggacttccagctggccgcagacaaaacccacgtaatgccccaccaccagcggcagaccgttacaggcctggtggtgaatcaacgggtggctctccccaaacctagacgcaggaccctgcgagcaatgctgcacaggctggagacgagtggccctgagacactggatctgcgtcaattacaggtggcccaggggcatctggccctcagtaagttgatcgacccagacggttacgatcttgcctgtagacatcttggcgaactgattcgaaactctgttgcaggctctgctctggggactgctgtggatagcggctccacagctaccacacggctcgactga

SEQ ID NO: 14069 - RNA, 1038 nt, synthetic construct
  source 1..1038: mol_type = other RNA
atgtccactagagcccagcgggcacatcctggcccactctttctgctccgggacaggaccgatccacgctgtcaccgaagagccctgattgacgcacatcgcaaacaccgtcccaacccacttaccaccacactcactagccttcctgattcactactggctctcgccggcgatacagagagacggtatcaggtgtaccccctggtgaatggcagcaagaggagatggatcgaggccccagatagagagctcaaagccgcacagaggtggctgctggaccactggctgtaccaactggctccaacggacgctgcccacggattcgtccgaggacggtctatagtcagtaacgctggacaccacgtaggccgggactgggtggtcactgccgatctttctaacttcttcccatccattggtgcggatcgcgtgtcacaggtgattgccgggctggatctcaacgcaaatgcctccgacgcagtggtccgattggtgacaaggcggcgacgtctgccccaaggtgcaccaaccagtccgcatctcgctaacctcgttgcccggcggctggacttacggttgatcgggtgggcgcgaaggggaggatggaattacactagatatgccgatgatctaaccttttcgggtgaggggaatcccaggacactactgttgactgtagagagaatcgttcaggacgaagggtttacattagctcctggcaagactcatgtgatgcccagacatcagcgccagctggtcacggggatggtggtgaacgaacgcgttacgcttcctaagcctcgccgcagacttctcagggcgatgttgcaccgcctgcaaaccacaggcgcagacgctgtggaccctggtcagctgcagatagctcagggccatttggcactggcccactttgttgacccggaaaggttccaggccgaatgcagggctctggccgacttacttcgtggggaggcgagcccccaagctgatacccctaatcccacagtatgcacccccatcgataagaaagtcgactga

SEQ ID NO: 14070 - RNA, 939 nt, synthetic construct
  source 1..939: mol_type = other RNA
atgcccaccgagtatatgtccgactttatgcccacaactctgccatgcccacccgctgcagtgctcgctctagctgactctgcagagcagagataccgggtgtacccactgatgtcaggaagtaaaaggcgctggattgaggctcccgatcaggagctcaagactgcgcagcgctggctgcttgaccagtggctctatcagctggcacctaccgatgccgctcatggcttcgtcccgggtcgatccatagtatcaaatgccgcacggcatgtgggatgtgcctgggtggtcacagccgaccttagaaactttttccctagcatcggggcgagcagagttgctcaagtgctcacagagtttgagcagcctgcagacgtaactgccgccttagtgcgtcttgtgacccgacgtcaacggctcccgcaaggtgcacccacttcgccacagctggctaatttagtcgccaggcggctagaccttcgacttttgggctgggcccgccgttcaggatggaactacacacgctatgccgatgacctgacttttagcggagccgggaatccacggcctttactggaggcactgaagcagatcgttcgggatgaaggcttcaccttggcgcccgggaaaacgcacatgatgagtcaccaccagcgccaggtggttaccggcatggtagttaacgaaagggttgccctgcctaagccgcacaggaggttgctgagagccatgctctaccgcctggaaaccatgggggtggataaggtcgacccacaacaactgcaggtggtccagggccatctggccttggctcacttcgtcgatcccgccaggtttgaggcggaatgcagagccctcgcaaccttgctaagagaagctagctcttccctgcctgctacagcctccagttctttcgtgcctgcagtgacgaaaacatga

SEQ ID NO: 14071 - RNA, 924 nt, synthetic construct
  source 1..924: mol_type = other RNA
atgaacagaagcgccttcgaccccggagtgaatgagacatcaggcgacctcatcgacctggtcgagagcctgaacgttcccctgcaacgactgtccgaaatagcagcgacagcaaacgagcggtatgacgtctacccactggttatcgggaaaaagaagcgctggattgaggccccaagagataagttgaaacagttacagcggcggctgctcgacagtgtgttctacaggctcgtacctcatgagtcggctcacgggtttgtcagaggccgatctattgtctccaacgctaggcgtcattgcggcagaagatgggtggtgactatggacatccgggatttctttccatcaatcggcgccgagagggtgaatcgtcaactcctgagcctgccaatgacagacgccgaacgcgagattgttgtaaagcttgtgaccaggaacgccaggctccctcagggagctcctacctcccctcacctcgctaaccttgtctctcggcggctagatatccgactgcgccgtctggccgatgaagcaggttggacatataccagatatgccgacgatctcgcttttagcggagaaggccgccccaagcaactgatcaggatcgtggaacagatcatacaggacgaggggtttcagcccgcaaggcagaaaacccgcgtgatgtccagacaccaaagacagattgtcactggacttattgtgaatgagaaggtggccctgccacgccccaaacggagactgttgcgagccatgctacaccggttgaggagtaccaatgagccgctttctagtttgcctgatatacgagtaatccacggtcatttagcattagctacgttcattgatccggatggttaccgcgaaacttgcaatcaggttgcgcagctgattgaagggaggtgttcattcgtgtga

SEQ ID NO: 14072 - RNA, 924 nt, synthetic construct
  source 1..924: mol_type = other RNA
atgggaaatgccttaagcgaatccgaaaacgggcgcaccgccggagactcgattaggcttgcggagattttatctgcaccacccgagcgactgaacgaaatcctggcaagtgctgatgaactctatcgcgtctaccctttgattaagggccgcaagaaaagatggatagaggctcccaggagcgaactgaaaaggctacaaaggcgtctactggactcagtactttatcggctggtgacagatgaatccgcccacggctttgtccggggtagaagtatcgtcactaacgccagaagacactgtgggcgggcctgggttgtgaccatggatatccgggatttcttcccaagcataggagctgagagggttgaccgccaactcgtgtctctccccatgacggaagtggaaagggagaatctcgtgaggctggtggtgcggaatgggagattgccccaaggcgctcctacttccccacacctggcaaatcttgtatcacgacgattggacctgagactcaaacgcctggccgagacaaccggctggacatacacccgctacgctgacgatctcactttctctggcgagggcaagccaggtaagcttgtccagattgtcgagaatattatcgttgacgaggggtttcagccggcctgtcgaaagacccgggtcatgagcagacatcagcgacaggtggtgacaggtctagttgttaacgataaagtggccttgccgaggcctaagcggagattgctgcgtgcaatgttacatcatctgtcatccgccaaccaggacagtgtatgcctccccgatatccacgtgatccacgggcatctggctcttgcggccctggtcgaccctgatggatatcggctgacgtgccgtcaggtggcacagctggtggagaaccgctacgacgacgcgtga

SEQ ID NO: 14073 - RNA, 1065 nt, synthetic construct
  source 1..1065: mol_type = other RNA
atgacaaaggctaacctgcccactaatggctgcgatgatctggctaatctcctggacctcgacccaaacagactgacacagttagcaggagaggctgtcaatctctacgagaggttccctctgaaaacccgaagacgacggccccgttggattgaagcgccaaagccgtttttaaaattggtgcagcggcgtctcttggaccggctgctctacgccaccccacctcatagtgccgcccatggcttctaccccgagctgtcaatactcacgaacgccagaattcatgtgggatccgcatgggtagtctcctacgacttggaggatttttttcccaccaccgatctcgacaaggtacgcagtgtgctgaataagaggtacgatgtggaagaaggcgtgcttgaaagcatcatccgattgacctgtaggaacggcaacctaccccagggcgctcctaccagtcctcacctagctaacctggccttctaccagggcgacgaactgctgtcagagctagcaaaacagcacgatttaggatatacaaggtatgccgacgatatgacattctctgggaaggagcttccggcggagctcgatgatgaggtgaggcagattgtccaccgagtggggtatcggctggctgaaaaaaaaactaagcgcatgggtcggcaccagtgccaaaaggtgacgggattggtggttaatgagggggtccgcctgccacggaagcaaagacgcagactgagagccatcaggaatgacatcgccatgatggggatggaaagcgcccttgcccgctcagggtatggaagcgtatgccagctccaaggacatcttgcatttgagcgcatgacaaataaatctaacggtgtttctcgtggactgcagaatctgcggcctaaaaacgcgcttgcaggccagccacctgttgaacccgaagataaggacggcggtcttcctcccccctcttgtccgagcgtgagaaggaggcaatccgctgaccacggcggtactccacaacagatgccagactcggagctggagtccactgttcagactgtcgggtga

SEQ ID NO: 14074 - RNA, 921 nt, synthetic construct
  source 1..921: mol_type = other RNA
atgcgcactacagaaacgcactccgttatcgtgcaggacatggacatctacccagaagcggatgccgtacctccgccactgacaagcgctgatctggcgaagtcactccatctcagtgaggagcgtctggtgagtctgctttcgtcagcagagaaatcttacaacagatttcccctgaagtgtgggcggagaaggcctaggtggattgaggctcctaatccatttctgaagcacgtgcagcggtgtctgcttgacaagattctgtataccgtcgtcccacatcccagtgcacacggatttcaacctgggagatctatcgtaagcaacgcaagaatgcactcttgccgggagtgggtcctatctatggacatgaaagacttctttcccaccaccgacattcatatggtggagaaaatgctgcaagagcatttcaacttcactcaggaaaccatagaggcgatcctccgattgacctgcagacgcaacgctcttccacaaggagcccctacctccccccatttggcaaatctagtgtttatggagggggatcggcgccttacggcaatggccatcgagcacggcatgacttatacaaggtacgccgatgatatgactttctcaggagacactctgcccgaagatatcgaggagcaggtcgaattaatagcccaggaagctggttatcggatttccaggcacaaaacccgccgaatgggccagcaccagtgccagaaagtcacaggtctggtggtgaatgaaggcgtgaggctcccgcgcgggaagagaagacgcttgcgtgccattctcaacgatgttcgaaagaatggcatggacgctgccttagctcggtccggcttcaggagcgccgacgaattgagcggtcacctggccctcgccaggatggttggaacagtgcagtga

SEQ ID NO: 14075 - RNA, 939 nt, synthetic construct
  source 1..939: mol_type = other RNA
atgctaaaagatctacagcatcctctcgaactgtcaaccgccgagctccagcctttcgctagccgcattggctttccaactgatgtgttatttgacatcctgtccaaaaaagaagaccaatactacagattccccataagcaaaaggaatggtaagaaccgctggatagaggcccccaagaatgagctgaagagtatccagaaacagctcttgctgcaaattctctatgaacagaaggctcattccgcagcacacggatttgtgcccaatagaagtattttgactaacgccaagcctcatgttggccagaattgggtcgtcaactttgacatcagtaacttcttttcgagcacccaaattcacctgatccacaaagtgcttcagacataccctactctctcaaagcgggaacagcacataatcttcacacttatctccaaggataacacgttgccccaaggagctccaacctcaccgcatattgctaaccttgtactttatgactttgaccacttcatatctgattatgcgcagaagcatcagctcgcctacacaaggtacgcagacgatctgacattctctggggaccagattccgaaggagcttccactgatcgtgaaaaagcgactgaaggaggatgggtatcacctggcccagcacaaaacctcatggacggggaagcataagaggcagctggtcaccggcctggttgtgaatgacaagatcaacttaccccgcccaatgcgtcggcagatgagagcaatcattcactccattaaaacaaatggcagcatcaaagcattcgctaccagctcttggtccagcgatcagctctacggtcggattgctctgcaggccatgtgggactctgaagccgcggagaaacaactgcgagagctgttgggagcccaagagttagattggactgcctatatctga

SEQ ID NO: 14076 - RNA, 1176 nt, synthetic construct
  source 1..1176: mol_type = other RNA
atgcccgttatcgataaggtggatgaattcaagatgatgtttaacggcgtgaaggacccagtaggaatctttgacttctgcggggttaacgcagagcgcgccttgaccgaaaagagtaaagacgctgaactggtcgagaaactcaatcaatttctggacggtcagttcttcaccagccactcaatagatcgtctcgcgcgggtggttggtgagggtactgatatcattagactggccaaagtaggctacagaggctccatctatatgttaaacgaatcggtggaccagtttgctgaactgtctgaggctatcggcttccctaaggaaatcattcagcagtacgtgtctgatacagcttcccattatagtcgctttttcatttggaaggatgaggctaagaccaaaaagcgatggatcgaggcccctgacgataccctgaaacaaatgcaggaggccattttaaggaatattctctacaaaatcgcccccacgaaatttgcgcacgggtttatttgtggccgcagtattgtcacatgcgccaaggcgcacacggggaagaagtttgtcttgaagctcgacctgaagaacttctttccatctataactagggaaatgctgcttggagccatggcaccctatataaacgaatccaactttaagttcgtcttgcccgccatggagctgtgtttaatggagggaagactaccacaaggggcacctactagcccggccgcaagcaatatcgtggctcgtcagctggaccttcttatgtacggaatctcctctcagtttggctgcgagtatacacggtacgctgacgatctaatattcagctcaaatgagagggacatctataccatgataccgatcatcaagaaggctatcgcaaaattcggcctggtggtgaatgagaaaaaggtgaaagttctgaaaagccatcaacggcagactgtgactgggctcgtcgtaaattcagatgggcagacatccgtggcccgaagaaaacggatgaaactccgcgcattcattcatcacattttgacaggtcggtacccactggatcgagtcaactttgccaggcttaagggaaatatcaccttcattgccatggcaaatcctaaccagggcaggtggttcctggagaaatgggacgaaattcaggccatgagaggatga

SEQ ID NO: 14077 - RNA, 927 nt, synthetic construct
  source 1..927: mol_type = other RNA
atgtttggctggtggcgacgcaggaaagagcgtaggcaactgactgagaagttgctgttcatcaaccggaacatcgccccacactatcattctttccccctcaaaaaggccacaggcgggtaccggacgatcgaagctccagtggaggagctgaaggaagcgcagagactcattctgaagaggtattactatggacttgagtgcagcacagccgctcatgggtttgttagggggcgatccattaccacatgtgcccggcaccattgcgatagactcgtggttgtagctgtagacatcaaagacttcttccccagcatcaccagagacatggtggagaagattacccgcgatatggtcccagagctcgcaaaaaataaggaactgttcgatctggtgttgggagcgattacaagcaatgatgccttacctcagggatcccctgcttctcccactttgagcaacctagtttttaacggaattgacaatcagctggtgagtcttgcctgcgcctttaaagccaggtactcccgttatgcagacgatctcttctttagctctcggtacaaccgaaatctgcctggcataattagttcagtggaacgcatcctaaatgcgcacggattctcgataaataggaaaaaggtgcgcgtgatgagaagaggccagcgtcaggtcgtcgctgggttaatagtcaacggcaaaactcccgccgtgggtcgagaacaactgagatcacttcgcgccgctattcacctgttggagaaggaacttcagggcgcaggtccacagagcccgagtgttgcaaagctgatggagtcaatccaaggtaaaatctctttctttcacatggtcaaccctcagtcagtgcggagactcgctcgcacctttaaggcaatctgtaggcagcaagcagcccggtcctcctga

SEQ ID NO: 14078 - RNA, 927 nt, synthetic construct
  source 1..927: mol_type = other RNA
atggttgatctactgcccctgctagtgaaggaaggagcaatggaggagtccagataccgcatgtatcggatcagaaaggccaacagacgctttaggacgattatggagcctgacccagctcttaaaagtctgcagcgctccatcttgagatggctgatggccaggaggatcagggcttctaagtacgcacatgggttcgtaaaggggcgtagcaccacaacaaacgcagccctgcacgtcggtaaacgggtggtggtccgaatagatattcaggacttctttcctaccatcacagagcgccaggtaaagtacgcgctgaccagagaggggctcctttctgatgatgcggcccgaatcgccgacctgtgcactgtggaaggcaaactcccacaaggcgctcccacctcccccttcctgagcaatatgatatttcgtgtgctcgactaccgactggccggtctggccaagaagtggggtgcaacctattcgcgctatgcagacgacttaatattcagttcagatcgggatgacttgcaggctatttaccacccagtcgcttcaatcctcgaggaagacggattcgaggttaaccctgataaatttcgggtttaccgtagcacaagaagacaacgcgtaacgggcattgtggtgaatcaccatccaactctgcctcgggaatctagaaggcggcttagggctgcactgcaccatgttcgcaggtctattgtgactggagaggaagtccccgccgagcgcttggacagcatcgaagggagcgccgcgtatttaacaggcattgaccgggagagaggccggcggttattggtggaagtccgagatctcaaagcactgctcgcccttcgcactagaatggtgagtaggaggcgaccgaggcgtacctcaggaatcgctgccgctccgtcctga

SEQ ID NO: 14079 - RNA, 963 nt, synthetic construct
  source 1..963: mol_type = other RNA
atgaatgccgctcccttattagtctccttctataccttgtctaaattcctggacgcactgccagagaagcatcggaattcctaccaacgtcagatcgaaaatctcttcgctcagagccttccgccatgtgtatccgaaatttgcctggccgtgctgttcgggtattcagtggattttgtctacgccctgagcaagaaccagcataagttttacaggtccttccagatcagacagggacggaaaactcgcaccatacatagtccaagagtagcactgaaggtggttcagaagtggttgggagtgcacctgtcggatgcaattacattcgagcctcacgtgtgtggctttgtgaagggtaagagctttgctgatgctgctaaaattcaccaaggagccaagtgggtttactctgtcgacattgaaaactttttccctagtatcacgattctccagatatccaatgcgctggaaaaactcggctatacaaaggaatcagcagagttgctggcaaatatttgctcactcaactccactttagctcaaggcagccccgccagtcccgtcatcagcaacattgtgatgaaagacatcgatctccagctgaaagagctagcggacaagtacgagctgcaggtgagcagatacgccgatgacatcgtgtttagcgggaccgagcctttcaacgaggggatccccaaagacctgaataccctctttaattctacctcattcactctgaacaagaacaagacctatttttctgacagtgaaaagggtcagcgccttaaagttcatggccttctcgtcaaaaaagataagatacgacttacgaaagggtatcgcaataaaatcagggccttccggcacatgctggaaaaggagaaagtgtctgagaacgacttgcaacgattgaagggccacctaacattcgccgagtttatcgaaaggaagaaccaggtttga

SEQ ID NO: 14080 - RNA, 963 nt, synthetic construct
  source 1..963: mol_type = other RNA
atgaatgcagccccactgttggtgtccttcgataccttgaagaagtttttagatgccctgcctgaaaagcaccgcaaaagctaccagcagcagatcgaaaaattattcacacagagcctgcctcctagtgtcagcgagacatgcctggctgtgctctttggttactcagtcgattttgtgtatgcgttgtcaaagaagcagcacaagttctatcggtccttcaaaataaagcagggaaagaaagtccgtatcatccatagcccgcgagtggctctgaaagttgtgcagaaatggttagggacgcatctgagcaatgctatcagtttcgagcctcacgtatgcgggtttgttaaaggaaagtcgtttgcggacgccgccaagatccaccaaggtgccagatgggtatactctgtcgacattgagaatttcttcccaagtataaccgtggtgcagatttcaggcgctctcgaaaaacttggctactctgaggagtccgctaaattcctcgctaacatctgttcgctgaacgggactcttgcacaagggtccccagcctctcccgtgattagcaacattataatgaaggacatcgaccagaggctgatcgaactggcagagaagtatgtgctgaaagtctccaggtatgccgatgatatcgtattttccgggaaggaacccttcagcacagacatacccaacgagctatctagtatttttggactgacccccttcctgcttaataagaacaaggcctactttgccgactcacagaagggccaacggctcaaagtgcatggcctcctagttaaggaggacaagattctgttgaccaaaggttacagaaataaaattcgggcgtttagacatatggtcgcacagggcaaggtgtctgagggcgatctcccaaggcttaaaggacacctcactttcgcagaatttatcgaacgcaacaatcaagtttga

SEQ ID NO: 14081 - RNA, 963 nt, synthetic construct
  source 1..963: mol_type = other RNA
atgaatgccgcccccctgctggtgtctttcaactctttcaataagttcctggaggccttgcctgtgaaccacagaaccgcctgcaagcaagagctcgaagagatttacggaaagtctcttccaatcggaatcagcgaggtgtgcatcgcagttcttttcggctactccctggatttcgtctatgccctgtcaaagaagcagcacaagttttatagatcgtttcagatcaagcaggggaaaaaaactcgtaccattcattccccgagggtggctctgaaggtggtccagaaatggctcggcgctcatctgagttcagcattagtgtttgaagaccacgtttatgggttcgtcaaaggtaagtccttcgttgatgcagcgaaaagccatcagggtgctaagtgggtgtactctgtcgatattgagaactttttcagtagcatcaccgacctccaaatctctgaagcatttaaagagttgggatacagtcacggctctgccacactcctgagtaatatttgttccctcaacagtaaactggcccaagggtcacctgctagccccgtcattagcaatctagtaatgaaagacgtggatgccgggctgaaggcgatggctaataaatacggactgcaggtgagccgatatgccgacgacatcgtattgtcagggaaggcagaattcaaatccgaaattgccggcgagctgcatagcatctttgaggccacgactttctcccttaacacagacaagacttactttgcagatgctgaaaaaggtcaacgcctcaaaatacacggcttattagtgaaggaggatacagtcatactaacaaagggctatcgcaataagatacgggcgtttcggcatatggtagagcagggaaaggtgtccgctgacgatcttccaaggctgaaaggccacttgaagtttgctgaatacgttcagaggcagaacgacacctga

SEQ ID NO: 14082 - RNA, 1119 nt, synthetic construct
  source 1..1119: mol_type = other RNA
atgcaaaaaagaagtggcgaggaactatctcgcgggtgcgcctcatgtcctttcgcaaaggcccgacataggaacacggatggccagactagtattcgcgcaagccccggctggacctttgttcaccgatgcaagttcttcgaaaaatatagcgtgatgaacgcggctcctctcttggtgagcttcaattcgctgtccaagtttcttgatgctctgccagaaaagcacagggaaaacaatggagatcagatcgagagtctcgttgacaagtcacttccccccgtcgtgtctgaaacatgtctcgctgtcctcttcggttattccctggattttgtctacgccctctctaaaaagcagcataaattttaccggtccttcaaaattcagcaaggcaaaaaggttcggaccattcattctccacgtgtagccctcaaagtggtgcaaaaatggttcggagcccatttaagcaatgcagtgtcatttgagtctcatgtatgcggcttcgtgaaggggaagagctttgcggacgccgctaaaatccaccagggtgccaaatgggtatactccgtggatatagaagacttcttccctagtatcagcacctttcagatatccaacgcattggagagtgtgggatatagcaaggatgccgcgcagctgctggccgacatcagctctctgaatttcaagttagcccaggggtccccagcatcgcccgtgttatctaatatcgtcatgaaggacattgacaagcaactaaaagagctggctaaccagtacgacctgcaagtcactcggtatgccgatgatatcgtgttttcaggaaaaggtgtttttcaggaagcattgcctaccgagcttgaagctatctttgaggggacaacattttccctgaataagaacaagacatacttcgctgacagcgagaaggggcagaggttgaaaattcacggtctactggttaaggaggacaagataactcttaccaagggatacagaaacaaaattcgcgcatttagacacatggtcgagcagggcaaggtgtccgaggacgatctgccgagactgaagggccacctgaggttcgccgagttcatcgcttcaaaaaacgaaaattga

SEQ ID NO: 14083 - RNA, 966 nt, synthetic construct
  source 1..966: mol_type = other RNA
atgaatgcagcccccttactcgtgtctttcaatagcatggacaaattcatcgaatctttccctaggagccaggtagagaaatacagacagaacattcagtttctgtatgagaattcactgcctcctgccgtttctgccccctgtctggcggtgctgtttggctactccacagactttgtatacgccctgtctaaaaaccagtacaagttctataggaccttccaaatcaagcatggcaaaaaactgcgaaccattcactcgccccgcgtggccctaaaagtcgtgcaaaagtggctcgggtaccatctgtcaagcgctatttcttttgacagccatgtctgcgggtttattaagggccgtagctttgtggatgctgctaagatgcacgagggtgccaagtgggtgtacagcgtcgacatcgcagatttctttccctccgtgtcctccgagcaggtcacagaagcattggtatcaataggttatttcagtgaatccgctgagcttatcgcaaatctatgcagtcttgatgaggttctgccacaagggtcaccagcgtcccctgttttatctaacctggtgatgaaggatatggacaaagagctgcttcacctggctgacaaacacggactcaaggtcacccggtatgccgatgatatcgtctttagtggccgcgataacttcatcgaagaactcccggaagccttagacagtattttcgagcagtccacttttagcttgaatcgggacaagactttttttgctgatgccgagaagggacaacggcttaaggttcacggactgttggtgaaggacgatcaggtgacactgacgaaagggtacagaaataagataagagcattcaggtatatgctcgaccagggaaaagtgtcggaggaagatatcccacgactccagggccatttgaagttcttcgagttcataaacgaaaagaacaaaaacgactga

SEQ ID NO: 14084 - RNA, 966 nt, synthetic construct
  source 1..966: mol_type = other RNA
atgaatgccgcaccactgttagtcagcttcaacagcatgaataagcttatcgaaagtctccctttatcacaggtggagaagtatcagcagaacatccaattcctgtacgagaagtcactgccccctgtggtaagcgtaccctgtcttgctgtgctgtttggatactctacggactttgtttacgctttgtccaaatcccagtataaattctaccgttcctttcagatcaaccacggcaagaagctcagaactattcactctccaagggtcgcgctcaaagtggtgcagaagtggctagggcaccaccttagtggagccatcagtttcgattcccacgtttgtggcttcgtgaaaggtagaagttttgtggatgcggccaaagttcatgaaggcgcaaagtgggtgtattcggtcgacattgtggacttctttagctccatttctaaacagcaagtgtccgaggctctggtgaacatagggtaccttcccgagagctcagaactgatagcaaatttgtgcaccctggataatgttctacctcaaggtagcccggcctcaccagtcctctctaacctggtcatgaaagatattgaccgccatctgcagtatctggcagacaaatacggcttgaaggtgtccaggtatgccgatgatatcgtcttttcggggacagacgccttctctgacgaactgcccttggatctggaggccctctttgaaccaaccgctttctctctgaaccgggataaaactttctttgcagacgctgacaagggacagcggctgaaggttcatggccttctcgtaaaagatgacaaggtgacactcaccaagggatacagaaataaaatcagggccttccgacatatgttagagcaggggaaggtctgcgaggaagacatgcctcgcctgcaaggtcacttgaagttctttgagtttatcgagagcaagaacattaatcagtga

SEQ ID NO: 14085 - RNA, 1020 nt, synthetic construct
  source 1..1020: mol_type = other RNA
atggacgcttgcccctccagtaagctgatctatgagatctgtgtcatgaatgctgcaccgctcctggtgagcttcgacagcatcgataaatacttagaggcgctgcccgaaaaacaccggacagcccactcagccgcgttgtctgatcttttttcaagaggtattcccccaatcacatccgcctactgcctggccattctttttggatatagcctggagttcatttacgcgatgactaagaggcctgataaattctaccgagtgttcagcattaagaatggcaaaaaaacacgaagaatccaggcccctaaggttgctctcaaggtgattcagaaatggtttggtgctcatctgagtaataacctgacttttcatccacacgtttacggatttgtcaagggcaggtctttcgtggatgctgcaaagcatcatatcggggcccgctgggtgctagctgtagatatagacaacttctttcctagcatttctaaagaaagagtgctgttgtccctcattgcccaaggttattctaacgatgccagtaaactcatctcagacctgtgttgcttgaacgactctcttgcacagggcagtcccgcaagcccagttctatccaatctgtgtatgcagtccatagacgactcgctcatcaagctgtccgagaagtataaggtaacagtgaccaggtacgctgacgatatcaccttcagtggcatcggagaattcgatgaggggctgaagcgggatttacaagaattaattaagagctcaggctttcagctcaacgatgacaaaacctattttgccgacagcaccactggaaagcgtcttaaagtccacggcttgctcgtgaaggaggattcggtccgcctgacgaaagggtacaggaacaaaatccggctgtataagcaccttcagaagtccggaagaatttctgaagatgactaccaccgcatcaatgggcatataaatttcgcagacttcatcgactcaatgtccgggataaaggacgccatttga

SEQ ID NO: 14086 - RNA, 966 nt, synthetic construct
  source 1..966: mol_type = other RNA
atgaacgcaccaccccttctggtgtcattcgctagtatcgacaaatatttggaggcccttcccccccagtacaaaacccagtacgaggatgaaatcaagcgtctgtatactaacggctttcctcccatcgtttctaagctatgtctgggagtgttgttcgggtactcatccgactttatatacatactggcgaagaagcctagcaagttttatagaagcttcactctcaaacaaggcaaaaagacccgaaaaatcttcgctccaaaggtgggtctgaaagtcatccaaaagtggttcgctacgcacctcagcaatgtgattgagttccaccctcacgtccttgggtttgtaaaaggcaagagcttcgcggatgccgctcagctccatattggagcccggtggattttttctgtggatatcgtggacttctttccatctataagtaaggaggccgtgattgaagccctcatacaaacccagtactacacatctaaggccgccgaattaatttcagacctgtgttgcttgaatgatgcattagctcagggaagcccggccagccctgtactctccaatattgtcatgaagccatttgacgagaagctcctggagctaagtaaaaagtacaacatcgttgtgtctaggtacgcagacgatatcgtcttctcggggaaggacgagtttgataccaaccttcataaggatttgaacgaactgttcgcagaatcatgcttcacactgaattcccagaaacagtattttgcagacagaaataagggccagcgcctgaaggttcatggcctgttagtcaaagatgaaaatattgccctcactaaagggtatcgcaacaaactgagggcttataaacacatgctgaacacaggtaaagtgtccgaaaaggacgtggagcggctggttggacacgtgaaattcagtgagtttatcgagtccaagaatgtaaactga

SEQ ID NO: 14087 - RNA, 957 nt, synthetic construct
  source 1..957: mol_type = other RNA
atgaacgccgcgcctctcttggttagctttctgaaagtggagacatacatcagggcactgcctattaagcagtctgaacagtacaaggatgagattataacactggtggaaaagaagttgccaccagttgtgtccccttattgcctggctgtgctgtttggctactcgcttgaattcgtgcatgccttaagtaagaaccagcacaagttctatcgacgcttcgagatccgccaggggcgtaaaaccagaaaaattgatgctcccaaagtcgccctcaaagttatccaaaaatggttcggctttcacctgagttcagctctcgaatttgagccgcatgtcttcggattcgtcaagggcctgtcatccgctaaagccgccaagctgcatgtgggggctcgatgggtgtacagcgtggacattctgaatttcttccctagtataagccagataaagatcaaagaggcgttaataaaggaagggtacaccgataatggcgcatctttgctcattggattatgctgtctggacggagcactagcccaaggctctccagcaagccccgtgctaagcaacatttttatgagggacattgacaagaaactttccgagttggctaggaaatatctcattactatgactaggtacgctgatgatatcgtgttctccggtagagacaattttccccagaaactgaaagacgaggtatcacaattgatcatcgaagccggactggtgctgaatgagaacaagcagtattttgcatctgtcgacaaggggcagcgccttaaggtacacggcctccttgtaaaagaagaggccgtccggctaacgaaagggtatagaaataagatccgggcctacaaccacatgctggccaacggtaagatctccgagaaggacatcccccgggttcttggtcacctcaagtatgcgaagtttatcgataacctgaattga

SEQ ID NO: 14088 - RNA, 951 nt, synthetic construct
  source 1..951: mol_type = other RNA
atgaaggcggcgcctctgcttatcagcttccacgagttgggctcttacatcgaggccctccctgaaagccagaaacggcgttacgctgatgaaatcagcaagttggccgaagcaaaattgccccctgtggtgagtccgtattgtcttgcgattctgttcggatacagccgagaattcatccacgcaatgtccaagcaacagcataagttctatcggaccttcaccattcataaagggagaaaacgcaggacaatacaagctccaaaggtggccctgaaggttatccagaaatggattggctatcatctctgccaggccatacagaggcccgagcacgtctttgggtttatccccggctgctccgccaagatggcagcagagcaacattgtaatgctctatgggtttacagcatcgatataaaagacttctttccgtctatttcagatgagctggtagagtcagctctgcaggagctcgggtattccgagatgggttcaaagttgataactagcctgtgctgttttaacggtgtgctggctcaaggctccccagcttcgcctacgctatccaacctcatcatgattaaagtggatgacgaccttcgcaaactcagtgaagaactgaacatttctgtcacacggtatgccgacgacatcgttttttccggcaagaacgagttccccgaagggcttgggggtcagatttctaacatctttcaggatgccggattagagctgaatgaagaaaaagagtacttcgcagacagtaggaaaggacagagattaaaggtgcacggactgctggtcaactcagataagccacgactgccaaagggctacaggaataaagtgagagcctacaagcacctcctgaattctggaaaggtcagtgagggtgacctgaagcgcctcttaggccacgtaaattatgccaatagcattgagtcgtga

SEQ ID NO: 14089 - RNA, 963 nt, synthetic construct
  source 1..963: mol_type = other RNA
atgatcgcaccccccttgctggtatcattctctgacatcaacagctacgtaaattcattgagtgaggagaaccaggctttacatgaaaataacattcggagcctgtttgaccagaacctgccaccaatcggatctattagtacactgagcaccatgttcggattcagcccgcgctttgtcgccatgctcctgagtgatgtgtcgaagcaatatcggaccttcgaaattcggaaaggtaaaaagaaaaggaagatccaggcacccaaggtgggcctaaaggtgatacagaaatggtttggtcatcatctctcaggggcgcttgtcctcgacgatggcgtgtatggattcgtgcctaaccgtagcgccatagacgccgcgagtaagcactgcactgcctcctgggtctactcctttgacataaaggatttctttccctccacaactcgtgaaactgttttgagcgcattggtggagctggggtacgtggaggagtccgccgaactgatttctcaactttgttgtctggacaataaattacctcagggagccccctcttcaccagccttgtctaacctcgtgatgcgaagaattgataccgaactggctcgattcgctgatgagaacaacctgacatacaccaggtatgccgatgacatcgttctgtcggggaaggaggagtgcccggaatccctctccgaggctgtccggagcgcctttaaagatacggactgggaactgaatccaaacaaagaatactacgctgacgtcagaaagggccagagacttaaagttcacgggctgcttgtgatgggggagaagcctatcctaacaaaaggttataggaataagctcagagcttacaactatatgatcgaaaatggcaaggcaaaggagaaagacttacctaggctgaagggccacattgagtatgcacgcctcgttgatcgctggaataatggctga

SEQ ID NO: 14090 - RNA, 963 nt, synthetic construct
  source 1..963: mol_type = other RNA
atgaatgctcctccactcctggtgagttactctaccgtcgaatcctacctgagtgccctcagccaagattctgtctcatcctatcagaaagagataaacgacctagtcgcacgcggactgcccccagtggtgaatacgaaattgctcgggctgctgttcggcctctccaataagtttatcacttccctcctgattgacaagaagagacactatcgcaacttcaatctgcggaaaaagggtaaagtgagaacaatcaacgcacctaagatgagcctgaaagtgatccagaagtggtttgggagtcacctcgcctcaagcattgattacgcatcgtacgtatacgggtttattccaggtagaaaagcgctggacgccgccaaggtgcattgcggatccaggtgggtttatagcattgacatcgaagatttctttccttcaaccccgtctgaactagtttacgaatcccttaagagcctggggtataccgagctgggcagtaagatcatcaccgagatatgtacgcttgacggctacctaccccaaggagccccttccagtcccgctttaagcaacctggtcgccaagaatctggaccgacatttgtataaattgtcaaccgatcttggcgtaaaatatacacgatacgctgacgacatcgtgttttcaggtgcggaggatttccccaagaatctgccggaaatcatcattgagattttcgctgacacaccatggtctttatctgaacgtaagaactatttcgcagacactttacttggacacaggctgaaagtccatggcctgctcgttaaggaggacgccgtgcggcttactaaggggtaccggaacaagatacgcgcctacaaacacctgctcgagcagggaaagatcaaagattctgatttgcagaggataaaaggccacttgacatatgctaagctcattgataacgatagcgagctttga

SEQ ID NO: 14091 - RNA, 984 nt, synthetic construct
  source 1..984: mol_type = other RNA
atgattgcaccacccttactggtttcttattcctcccttaatgaatatctggaggctctgggtcctgagcttagttaccagtataagaccgaaataacgcagttattcgaaaagaggctgccaatcgtagtatctttcaggtgcctgtccgtattatttggcttcagcacaaactttgtgtacaaactggcccaacaaaattggaaattttaccgcaccttcaccatccgtaaaggcaaaaaaaaacgcaccatccaggctccaaaggtcgcgttgaaggtcatccaaaagtggttcgggtaccacctgagcgaagtcctctcgttcgataaatacgttcatggttttgtgccgggacgaagtgccattggggcagcgaatgtccacacaaacgctcggtgggtgtactcagttgacatcgaaaatttctttcccacaactacgaaaaaggtcatcaaagaaagcttgatctcaatcggatattcattcgaggcagctgacctgattgccaacatatgctgctacaaggacactctggctcagggtgcccctagttcccccgtgatttctaacctagtgcttaaagaactcgataagcagctcaagaccatagccgattccaaccagattaggttcactagatatgccgacgatatcgtgtttagtggcattgataagtttccgaccgagatcaaggatcagattagcgacttgtttaaggaaacatgttggaagctgtctcctgagaaggagtatctagcggagtcacccatgcgcctgaaggtgcacggcttcctcgtgcatggggagaaagcccggcttactaaaggctatcgaaataggataagagcatacaagcatctcttgaatgccgggaagattagaaacgaggacctgggccggattgtgggacacgtgaaatacgccgagagcgttatcaaggctcagaaaccaggactctgtcctgactctgcacacagctga

SEQ ID NO: 14092 - RNA, 954 nt, synthetic construct
  source 1..954: mol_type = other RNA
atgcttgcaccaccgttgttagtgtcctacacaagtcccgaggattatctcattgcgttggacccaggactccgtaggctgcatcagagtaagatcaagcggttgctcgagcagggtctgccccctgtggtgagctccagatgcctgggggttctgttcggttactccaccaagttcatcaatgccatggcccaacagaattggaagtactatcggtcattcaccattcgcaaaggcaagaagaagcgcaaaatccaggcaccaaaggtagcgctgaaggtgatccaaaaatggtttgggcatcatctgagtgaaagtctctcgttcgacgaccacgtatttggcttcgtccctggcaagtctgcaccctttgccgctaaacagcacactaacgctcgatgggtctatagcgtcgatatttctaatttcttccctagcacccccaaggacgtgatttcaacaactcttgtggacattgggtactcagaaaaggctgcaaagctgatgagcggccttctatgtcaccgcgactatcttgcccagggctcccctgcctccccaatactgagcaatctggtttttagagagctcgataaacagctcaaagagatcgccggaaacaataggataaggttcacccgttacgccgatgacatagtgttttctggggtcgaccaattccccgaaaacattaaagaacaggttaacaacctgtttgctgattcttgctgggtgctgtctaaggagaaggagtatttttcagagattcctaaacgactgaaagtgcacggattattagtccatcgcgatagaccgcggcttacgaagggttacagaaataggatcagggcctacaaatatctattggagacaggccaaatcgaaaaacgggatctgagcagaatcatgggacacctcaactacgctaagtccatcgacactcaggaaaaatga

SEQ ID NO: 14093 - RNA, 954 nt, synthetic construct
  source 1..954: mol_type = other RNA
atgaaggcacctcccctgttagtgtcctactcatcgatcgacgattatctgtccgcaatttcaccggaagacagagagcaatatgaaaaacagattaggtcgttggtctgtaaggggctcccacctgttgtgtctagccagtgcttagccaatctgtttggatataccaataccttcgtgcatagcatggcttcaaagaactggaaatattaccgtggattttctatcaggaaggggaagaagaagagatacatccaggctcctaaggtcgccctgaaggtgatccagaaatggctcggctttcatcttgccaaatccatcaactacaacgatttcgtatatggttttgtggaaggcaaatccgccatagacgcagcagcctgtcacactaatgcaacttgggtgtatagtgtagacataaaagacttcttcccctcaaccagcaaagagacattgatcagtaaccttgaatccctcggttactccaggaaggcttcagctctgattgcgagcttatgctgttacgaagattatctggctcagggaagtccaagcagtcccgtgctatctaatctggttatgcgggatattgacttggagttgtacaaaatcagcatgatccacggcgtcaggctgacacggtatgccgacgatattgtgttctctggacaaagcgagttcccagaatccctgaagcgagaggtcaagagcctctttgtggatacatgctggtccctgtctgagcagaaggagtacttcgcgcaaatacctaagcgcctaaaggtgcacggccttctcgttcatcagaatagtccccgcctcaccaaagggtaccgcaacaaaattcgagcttttagacaccttctggaagcccacaaggtccatgagaaagacattaaaagactgacgggccacatcaaatacgccgagtctgttgatcggcataagaactga

SEQ ID NO: 14094 - RNA, 960 nt, synthetic construct
  source 1..960: mol_type = other RNA
atgattgctgcacccctattggttagttacaattctctggaggactacctctcctgtctgagtagcgaaatgcgcgaggaacacgaacagcagataagatggttggtggaccaaaagctgcctcctgtcgtctcaagccgttgcctcagcgtgctcttcgggtacagtgcaaagtttgtcaatgcgatggccctgaacaactacaactattaccgcgagttcactataagaaaaggcaacaaacgacggaaaatccaggcccccagggtagccattaaaggcattcaaaagtggttcggacaccacttgagcgaggttctgccagtggaggattatgtctacgggtttatcccaggaaggagcgctgttgatgcagccgcacagcattgcggcgcttcttgggtgtattcagtcgatatcgagaacttctttccgagcacaacagacgatgtagtgattaaagcattaatggagatcggatacagtgagaaaggcgctagacttataacccggctctgctgttatggcgatcgcctgggacaaggtgccccatcctctcccgttctctccaacctggtgatgaaacctatcgacattcagcttaagaatatcgccgagaatctaggggtgaagctcactcgctatgctgatgacatcgtattttcaggccagggaaaatcccctgtcgaattaagggacagggtcctggatgtgtttaaagacacctgttgggatctggccgaaaacaaggaatatttctcgaattcagacttagggcagcgacttaaggtgcatggcttgctggtgaatggtgagaagccacggctgacgaagggttaccggaatagggtgcgggcctatagacacctgctggagaacaatcgtgttaagcccgaagacaagcgaagacttattgggcatatcaagttcgcggaatccgtggaatcttggaaggagtga

SEQ ID NO: 14095 - RNA, 960 nt, synthetic construct
  source 1..960: mol_type = other RNA
atgaagccaccgccctttttcgtgtctttcaggactgctgccgattatcgggcggctctgggcgatggtgttgcggaattgtactggcccgatattggccatcttggcgagcgtagactgccccccgtagtgtccgtacgagccttggcatgcctttttggcgtgtcttccaaatttgtgggagccctcagaagaaatccagagcggtattatcggtctttcgttatacgcacagggaggaagaagcgccagatccacagcccgaaggttgggctcaaagtctttcagaaatggttcgggacccacctcgcagcagcactcgagttcgatccttgggtattcggcttcgttcctgggaggagtgcgccaatggccgctcgtgtgcacgctagagctcgatggatttacagcgtcgatctagccgactttttcccatcagtgtctcgcactagggtggtgggagctctgcaaggactgggctaccctggccatggtgccgagttagccgccagtctctgttgctacggcgaaggccttgcacaaggctcccctgcaagccctgtgctgtccaatctggtctttagggaacaggaccagcagctgcacgagctggcgagggaatttggggcacggttgacgcggtatgccgacgacattgtcttcagcggtcaggcagccgtacctgctggacttcccgaccgggttaaagctgtggtgaccgccggagggtgggacttaaacgacgccaaggaagagctggccgaatcacccatccgtctgaaggtgcacggactcgtggtccatggtgaccgcccacgcttgacaaaggggtaccggaacagaatccgagctctaaggcacctgagcgccgtcggtaaagtgagatcggaagatgctgcccgcgtcgcaggacatttacgatacgccgacagtatcgatagactgtcagaggaggagtga

SEQ ID NO: 14096 - RNA, 969 nt, synthetic construct
  source 1..969: mol_type = other RNA
atgaacactccacccttgctggtcgtgttcccgggcctggaatcccttggcgctgccttggctagggatacgcaccgcatctactggagcgacgtagaaagactggttgagaggggcttacctcccgcggtgagtgtgagggtggtggcatgcctgttcggattttctgcgcgtctcgtcggtgcaatccagcggagcccagagcggtattacaggatattcaagattccaaaagggaaatcatcgaggcagatagaagcccctagggtcgctctcaaggtaatccagaagtggttcggatcccatttggctgccgcctgccctcttgacgactgcgtgtatggatttgtgccgggcagatcagcacccttagccgctaaacagcactgtggcgccagttgggtttacagcctcgatatccgggatttttttccctcagtaagctcaggaatggtgagcgaagcactgcgcctgaaagggtaccctgatcacgcagcctctctcatggccaagctatgttgttatgagggacggctggcacaggggagtccagcttctcctgctctgagtaacctggtttttgccccagtcgaccaactgcttgccgaaattgcacgggcgaatgcttgcacatacactagatacgctgacgatatcaccttctctggccgaacagaggtccccgcacgcttacaggaggaggtgagaaaggccctgcaagagggggggtggcagattgcgggtcataaagaacacttggcccgtgctcctcgacggctcaaagtccacggcctgctggttaacggaaggttcccccgccttaccaaggggtatagaaatagactccgcgcactggagcatcttctcggacagggccgactggacgaagccaaggagatggaagtgagaggccatctagcctatgcccgctccgtggagagcttgcaaaagtcctccgatggtggttga

SEQ ID NO: 14097 - RNA, 972 nt, synthetic construct
  source 1..972: mol_type = other RNA
atgagaacccctcctttccttctgtcattctcctccctcgaggaatacctgcgagcactgtccgattccgacagagcggaaaaggggtccgaaatcaacaacctagtggctcagcagctcccccccgtcgtttctaaaaagtgcttagccactcttttcggcttttcaaactctttcattgacacacttcacagacggaccgagcgatattatcggatatttgaaattcccaaaggcaagaagaagcgcataatccaagcccctcgtgtggcgctcaaagtgatccagaagtggtttgcccattatttggctaattcactgaacctgcacgaggctgtgtttggatttgtgaagggaaggagcgctgtgcagggagccgcactacactgtggcgcacattggatttactctgtcgatatcgaagacttcttccctactacaagcatcgacaaggtgattagttcgctgacgaacctcggttatggataccccggggctgccctcattgccaagctttgctgctacgagggtaatctcgcccaaggtagcccagcctccccagtcctgagcaatctcgtattccgcgagatcgacgaagaactgtttaccttgagtaaacagaatgggatctgttacaccagatacgccgatgatattgtattctctggcatcaattcttttcccgatcacattagggaggaggttatcagcatcatacaggccagggggtggaagctgagcatcaagaagattcatttggcaaaaaggccgtacagactgaaagtttacggcttactgatacatggggagcgtccgcggctgacaaagggctatcgcaaccggatcagggcgttcaaacatttattcgcagacggcaaaatcccagaggacgagataagtaaaattcgcggacacctgtcatatgctcacagtattgaagagtttgagatgatgccaaaagatgacttgtga

SEQ ID NO: 14098 - RNA, 960 nt, synthetic construct
  source 1..960: mol_type = other RNA
atgaacgcaccgcccttactggtatccttctcgagcaccatggagtaccgggaagcgctgagccacgaattgcgcgggctctactgggagactatcgagaagctcataagcaagaaattgccccctgtcgtgtcgattagatgcctgagtatcctgtttgggtacagcccaagattcctgggggctatgtatcaatttactgaacgctactatcgtacgttcaccattaaagctggcaaaaaaaagcgaaccataaacgcccccaaagttgcgctgaaggttattcagaaatggctgggttaccatctgggcgaatcattgtcattttgtgaccacgtgtacggatttatcaagggtaaatcagccatccagggagcttacgtgcactgtggtgccagctggatctacagcgtcgatattgagaatttcttccagactacaaacattgagaaagtgaagtccgccttaaatggcatcggcttccaggaacgaggatcagaagtgattagtaagctttgctgctacagtgggaacctggctcaaggatctccagcctcccctatcttgtccaatctcgtatttacaaacacagacaatgatctagcaagactggccaacaagaatgggctattatattctcggtacgctgacgatatagtgttctccggaaaagaagacgtccctgccgacctgtctaacgatgttaaatctattatcaccagatctggctggaaaataagcgagaaaaaggagtatctcgcaaagaggccacacaggctgaaggtctacggcctcctcgtgaacggcgattatcccaggctgacaaagggatatcggaatcggatcagggcttttaagcatcttgtggagaatgagaagattgcagatgagaataagaagcgccttcttggtcatctcgcctatgcaaagtccatcgacaacttcagtaacaaatattga

SEQ ID NO: 14099 - RNA, 969 nt, synthetic construct
  source 1..969: mol_type = other RNA
atgcagagcccaccccttctggtgtcctatccagagctcgaggattttatcaaggctcttccaaatgactatgcggccgatacaaagcaggtgctgcgccatctgcactctctgtctttaccttctgtgacctccataacatccctggccgtcttgtttggtttcagtcctaggatcctagcctccatgaccaatcaaccggagaagttctacagagtgttccggatccataagggtaaaggaaagtacagaacaattcaggctcccaaggtggccctcaaagtcattcagaaatggctgagtcatcacattagcgaagccatcacttatcccaaatacgtgcatggcttcgtgcccgggcgaagccacatcactgctgcacaggcacacgttggagcgaattgggtgtattcaatcgacatcgagaattttttccctactacctccgagagcaaggtcgaggcagcactgaggggcattgggtacagcgaatccggctctaagctcattagcaagctttgctgttatacgaagaacttgtcgcagggcagccctgcctctccagtactcagcaacctggttttcaaagacttggactctcggattgctgaactctcttcacagatcggggtgaactacaccagatacgccgacgatttagtctttagtggacaaggcgaatttccagaggctttactgcctgtcaaggcatggatatccgaggccggttggagtgtttcaaaagataaggaacacttcgctcaattgcccaagcagaggctgaaggttcacgggctccttgtacacgaatcaagtccgattctcaccaaaggataccgcaaaaaaatccgaacgtataagttcctacacgagaacaaccggatacgtgaagatgacaaaaaccgcatcctgggccatctgtcatacgccaaactggtggattcgttttccaatcagacagaggaatga

SEQ ID NO: 14100 - RNA, 978 nt, synthetic construct
  source 1..978: mol_type = other RNA
atgaaaacacccttgccactgttttttacctttgccgacgcagaacagttgcttaaggccctgagcaagcctttgagagacaggtattccgcggaattacttcgactccagcaactaggcctgcctcccctggtgtcttggtctatcctgagcgtcgccatcggcgtatcacctcagttcatcacctcaattctgaagaacaagtctaagtactatcgggtcttcccgatcagtaaagggaagggcaaaaaaaaacgcattatagaggccccaaaggtgtccctaaagattatccagtcctggtttgcctaccacatatcgctgaatgggaacattaccttgagtaagagcgcattcgcatttattcccggtaaaaacggaatatacgaggccgccagcgttcattgcggtgctaagtggatcatgtctatcgatctgagagactttttccacacgatcaccagtgaggctgttgtcttagctctgactgagattggatatagggaggatcaagctagcaagctgtcagatctgctgacactgaatcagagattgccacagggcgccccttccagcccagtgatcagcaaccttgtgttctcgaaaacagacttcaagattaatgagcttatcgcagatttaaacgtgaaatacacacgctatgcagatgacctcaccttttcctctgaagacgaatcattcgatatcaatagtctcaaggaacggatcgtacagatactggtttccgataattggattgtcgctgacgagaagctgaagatagctaaggcgccgaacaggctcaaggtgcatgggttcctagtgcacgagattaaaccccgtctcactaaagggtatcgcaacaaaatccgagcctacaaacatctccttaatactggaaaagtcgtgctggaggacctcgataagattaaaggccacattaactactctgactacatcgaccggctcaatgaatga

SEQ ID NO: 14101 - RNA, 978 nt, synthetic construct
  source 1..978: mol_type = other RNA
atgaaaacacctcttcccctgttctttactttcactgatgccgaacagctgctgaaggcattatccccaagcctcagagatcgctactccgctgagctcatccggatgcaacaactgggcctacctcccctggttagttggtctgtgctgtctgtggccatcggcgtatccccacagttcattacatcgctgatcaagaacaagatcaagtactacagggtgttcaccattcccaaaggaaagggtaaaaaacgccgggttattgaggctccaagggtgtctctgaaaattattcaggcctgggtagcgtatcatctgagcttgaatgagaacatcagcctcagtgagtctgcatttgccttcatcccgggcaggaatggtatatacgaggccgcaagcaaacactgcggcgccaagtgggtcttgtccatcgacttaagagacttttttcacacaattacgagcgtgttagtcagcgccgcgcttgtcaaaatcgggtacaaagctgatcaggccaacaagctttcagatcttctcactctgaaccagcgtctgcctcagggagctccctccagtccggtaatctccaatctcgtgtttaagtcgaccgatttgaaaatcaacgaacttatagtcggcatgaatgtcaagtacaccagatacgctgacgatctcacctttagctcagaggacgaaggagtggacattgaactactcaaggagaacgtgctacgagtcctgaattcagatggatgggttgtggcagaagaaaagctgaagataagtaagtcaccaaatcgcttgaaagttcatggcttcctggtgcacgagataaagcctaggctgaccaaggggtatcggaacaagatccgagcatataagcatttgctgcagacagggaaaattattgagggggacctggacaagataaaaggacacgtgaactattctgcctatatcgacaaactcaatgaatga

SEQ ID NO: 14102 - RNA, 978 nt, synthetic construct
  source 1..978: mol_type = other RNA
atgaagactcctttaccactgtttttcacttttacagatgcggagcaattcctcaaagctctctcaacgccactccgtgatcggtattccgctgagcttattcgcctgcagggcttaagactgccccccctggtcagttggagcatcttgtcagtagccattggcgtctccccccagttcatcacctctcttattaagaacaagtcgaagtactaccgtgtcttctcgatcagtaagggtagagggaaaaagaaacgaatcatcgaagcccctaaggtgtccattaaaattatccaatcatgggtggcgcaccacctgtctatcaaccacagcttggggatctccgaaaatgcctatgcctttataccgggaaagaatggcatatacgaggctgctagcaagcattgcggggcaaaatggatcctgagtatcgacctacgcgatttttttcacaccattacgtctgatatcgtgataagcacactagtggaaattggctatcgcgccgaccaggccgccaaactttcagaactgttgaccctgaatcagagactcccacagggtgccccaagcagtcctgtgatatctaacctggtgttccgctccacagacctcaaaatcaatgagcttatcagcaacactgggattaaatacaccaggtacgcagatgatttaaccttcagcggagatgacgaaacattcgacatcgaggaattgaaagacaacgtcgttgagctgcttctgtctgataattgggttgttgctgaggaaaagctccggattgcaaggattcctaaccggctgaaggtgcatggatttttggtccacgagaataaacccagactgaccaaaggttacaggaacaagatacgagcatataagcatctgctgaggactggcaaaattgtagagaaggacttcgacaagatcaagggacatgtgaattattccgaatacattgaccggctcaacgagtga

SEQ ID NO: 14103 - RNA, 999 nt, synthetic construct
  source 1..999: mol_type = other RNA
atgaaaacaccactgcccttgttatttagttacgaggacgaggctcagttcctccgaagcctcagctcaggtttaagaaaccggcactcagaggaagtgcgccgtctggtcgccataggactccctccagttgtgagctggagtgtgctatccgtggcaattggcgttagccctcatttcctgaacagcatcatcaagaacaaatgtaagtactatcgctcttttacgattagtaaaggaaaagggaagaagaaaaggctgatcgaggccccaaggatctcactgaagctgatacaggcttggttggcctaccacctgtctcgcaatagcgccgactacatctccgaaaattcgtacgcgttcatacccggggtgaatggtatctatgaggccgcaaaacggcattgcggctcccagtgggtgctgtcgattgacctcaaggactttttccactatgtaaactctaacaagatcatgcccgcactgctggatcttggatacaggacagaacaagcagctaagatcatcgatattgtcactctgcaggataggctaccgcagggggccccttctagtccctacatttctaatatcgcttttaaacccaccgatgagttaatcgaaagaattattaccggaagaggtgttagctataccagatacgcggacgatttgaccttctccgggtgcgatgccgagttcaacatcgacggcttcaagggcgaaattattaacgctttgaagtcccacggttggatagtagcccttgataaagtcaaaatctctaagaagccaaaccgacttaaggtccacgggtttctggtgcataatcagaagcctgtcctcacaaaaggctaccggaataagctccggacttaccgtcacctgatgcaagcaggaactattaagcctgacgatctcgacaaaataaaaggccatctgaattatggctattatatcgaccgccttaattcacaggaagtggagttttcctgttga

SEQ ID NO: 14104 - RNA, 990 nt, synthetic construct
  source 1..990: mol_type = other RNA
atgaaaaccccactgcccctgctttttagctttgagaacgaaacccagtttctctcctccctgtctttagggctgcggaatcgacacgcagaagagattaggcgtctgcttgctttggagctcccgcctctggtgagttggtcggtgctgtccgttgccatcggagtaagcccccatttcctgaacagcataatcaataacaaggtcaagtactatcgaacatttactgtgtctaaggggcgggggaagaaaaggcgcctgatagaagcaccccgggtgtccctcaagctgatccaggcctggatcgcacacagtctgtcccacatgtctagacaatatattagcgagcactcctacgcctttattcctggtgtgaatggcatatacttggctgcaaaaaagcactgttcaagtcaatgggttctatcaatcgacctcaaggacttcttccacagcataacagccgagaaaatcatcccagcccttattgagatgggctacagggctgagcaggcttctaaaattatcgatttgatcacgctgaatgagcgtttaccccagggggcgccatcaagcccttatttctccaatgtgtctttccggccaacagatgacttaatcgtgaggatgattgacggacagagtatcaaatacactaggtatgcagatgatctaaccttcagtggcgtggacctggatttcgacgtcgaaaaattccgcgatgacatcattgccgttcttcacgagcataactgggaagttgccctcgagaaagtcagaattagcaagcagccgaacagactgaaggtccatggctttctcgtacataatgataagcccgtgctgaccaaaggttatcgcaacaagattagagcttatcgctaccttatgttgtcaggcgcgattaagcctgatgacatatgcaaagtcaagggacatttgaactactcagactacatcgacagactcaatgcctctgaagaagtgtga

SEQ ID NO: 14105 - RNA, 978 nt, synthetic construct
  source 1..978: mol_type = other RNA
atgaaaacacctctgcccctcttctttagctatcccgatgccgaacagctgttaaaagctcttagccaatcgctccgggtgaaatatagctccgagttggcccgcctggaacagctcaagctgccaccccttgtgtcctggagtgtgttgagtgtggctattggggtcagccctcagtttatcaccagcctgattaagaacaagtctaaatactaccgggtcttctctatctccaagggcaaaggaaagaaaaagaggacaatcgaggctcctaaagtgggtctgaaaattattcaagcatggattgcgcatcacctatccattaacaccttcctagatatctctgattccgcgtatgcattcataccaggcaagaacggtatataccaggcagctaagaagcactgtaactcaaaatgggttctgagcattgaccttaaggacttcttccataccatcaccctggacaaggtaattctggcactcatcgatattgggtatcacgccgagcaagcctcaaaactggccgagattttgactctgaaccagaggttaccgcagggcgctccatcctcacctgtgatcagtaatctcgtctttaaaagcacggacgcctgcatcaacgagttcatagtcgaggataacatctcctatacaaggtacgccgacgacttgatctttagcggggtaaatgaggatttcgatatcgattcactgaaggacaatatcatagttctgttacagtctaagggctggatcatcgccgaagaaaaactgcacatcgcgaaagttcccaatcgcctcaaggtgcacgggtttttggtccatggcaacaagccaagactcactaaaggatacagaaataagattcgggcttacaatcaccttcttcatgccggacgaataagtgaaaaggacatcgaccgtataaagggacatgtgtcttactctgcatttattgatagtctgaatgactga

SEQ ID NO: 14106 - RNA, 984 nt, synthetic construct
  source 1..984: mol_type = other RNA
atgaagactccccttcctttgctgtttagctataatgatgcgcagcagtttctgggagctctaagccctgaggtccgcgatgtctacagccctgagattaaccgactctttgacaggggcttgccgcccgttgtgtcctggagtgtgctcagtgtcgctatcggggtttcaccgcacttcatcaactcaatcattaagaacaaggataagtactaccgtatcttcccaatcgcaaaaggcaaggggaagaaggtgcggattatagaatccccaagagtgggactgaagatcattcagtcgtggctggcccaccatcttgcaacaaacgataatattcccgtctcagactcagcatatgccttcatacctggaaaaaacggtatctacgaagccgccttcaggcactgcaatgccaaatgggtgctctctatagatttaagggacttctttcactctattgatttcgaccgcgtgatcaatggcctgagaaataccggctacacttttgaacaatctggaaagatcgccgcgatagtcacatacaagaatagactgccacaaggtgcacctagctcccccgtacttagcaatattgtatttaaagacacggatgacaagatcaacgacattatcgccgacaaaaagattatctatactcggtatgctgacgatttgacattctcttccgatgacctctccatcgatgtggagaacctgaaacagaatattataaacctgctagagaacgagaattggacaattgctaccgagaaacttaaaatcagtaagattcccaatcgactgaaggttcacggcttcctcgtgcatgatgttaagccacgcttgaccaaagggtaccggaataaactgaggacctatgaacatctgctcagaaatgggaaaatcatagaaagcgacttaaaccgtattcggggtcacgtgaactatggcaaacatatcgacaagctgaacgacgagaactga

SEQ ID NO: 14107 - RNA, 984 nt, synthetic construct
  source 1..984: mol_type = other RNA
atgaaaactccactccccctgcacttttcatacgacagtttagaccagttcctggcaatcctttccccaggccttaggcagcgccatgccgaagagctgagacgactggatgatttgaaacttcctccggtagtgagttggtcggtcctcagcacagccattggtatctctccgcacttcatcaactctttgatcaggaataagaacaaatactacagggtcttcacaatcgcaaaaggaaaggggaagggaaaaagggtcattgaggccccaaaagtgagcataaaattgatccaagcttggctggcgttccatctctccaataacgacaacctgggcctgtgcgatgcggtgcatgggtttatccccggacaacacggaatctatgaagcagcgaagaagcactgtgggtgcgactgggtgctgtccattgatctgaaagacttcttccactcaatctcacaccgccgggtggtaaacgcttttgagaatctgggctatacggtggcacaggctgagaagatcgcagacattaccacctataatgcccacctccctcagggagctccaagcagtcccgttattagcaatctggtgtttaacgacaccgataatgctataattcgcttcctagatgggaagggtatctgttatactagatacgccgatgatttaaccttttccggttcagatatttcttatgacgtcgagaagttgaagactgagatgctgcagcttatctccaacgacgggtggatcgttgccaatgaaaaaacacacattgccatagctcccaatagattaaaggttcatggctttctcgtgcatgccgtgacacctcggctgaccaagggatatagaaataagatacgtgcctacacccatctcctgaactctggcaaagttgaccctgaagatctcgacgtcattcggggccacgtgaactacggccgatacattagcaagctaaacaatggtaactga

SEQ ID NO: 14108 - RNA, 966 nt, synthetic construct
  source 1..966: mol_type = other RNA
atgcgtaccccgcctcccccactcctcgtaagctttaagtccactcaaaatcttttggatgcactgccaagcgccattagtgagaagtacaagaccgaaattaatgagctactggataagatgctgccacccgtcgtcagcgtcgccgttgtcagcatcatttttggggtgagctcaaacttcattgccagtatactcaggaatcccataaaacagtatcgggtgtttacgatcaagaaaggcaagaagaagcggcgaatcgagtcccccaaaataggtttaaaattactgcaatcctggatcggagcaaatttgtcaaacaaaaagcttctgagcgattctgtgtacggcttcgttcccaaaagaaatggcgtgtttgaagctgctcagaaacattgtctggctaaatgggtttattctatcgatcttcgggactttttccctaacatctcaagcagaaggattaagaatgagctggaaaagttggggtattcgaagcacgccatcgagctgatctcaacaatctgcacctacgaagaccgacttccgcaggggagtccagcatctccagtgctgtccaatctcgtgttccgggagactgacaaaaacttagaggagcttgcgaagatgctggatattagatacacacgctatgctgacgatctagttttcagtggcctcggagtgattcctgagaacttgcagaacaagatcaagaaaattctgatcgacgacgattgggtgctggccgaggaaaaagaacacttgtctaagcttcctaaccgcctcaaagtccatggcctgctggtgcacggggacaaacctcgcctcacaaagggatacagaaataggataagggcgtataaacatctactcgaactggagaagattaaggaagtagacctgtactcttgcaagggtcacgtgtcctacgccaactccctggacaagttcaccgataaatga

SEQ ID NO: 14109 - RNA, 963 nt, synthetic construct
  source 1..963: mol_type = other RNA
atgaaagccttatcaccacccctattcgttaatttttccagtttagacgaagcgtttcaagctttttcttatcccgaaaacattcaggactggagagcactgactcagaggaacctccctcctgtgatctcaactcaattcctcagcctcctgttcggcgtcagtcccaattttattagttcgataacgcgcaaacccaacaaaaactaccggacatttattatcaagaagggcaagaaggaacgtgtgattaattcaccaaagatcggtcttaagctgttccagacatggattggacatcacctctcccgggcagtactgctggaggaaaatgtatgcggcttcattcctggcaagaatggaatcttggaggccgcttctcagcattccgcagccgggtggttgtattccatcgacttgcgggatttcttcagtaagattaattccgagcgcgtgaaaagcgctctgctggacctgggttaccccgaggattccgccaaacttataacctctctgtgtaccctgaacggatgcctaccgcaaggaagcccagcgagcccagtccttagcaatttagtgttcaagagcacagaccaaatcttcatagatctggcatcaaagctgaacattagatacaccagatacgcagatgatctcgtcttttctgggaacaacaaccagcccgagaacctccctcagatcatcaaggaaatcctgaacaatgagaattgggagatcgcccctgaaaaagaagagaatttgaaagccccgtatcgacttaaagttcatggtctggtggtgaacgggctgactccacgactcacaaaagggtacaggaataggatccgcgcctacaaacacttgaagaataccaacaagatcaaggacaacaaagagaaaatacagggccaccttgcttatgccgatcaggttgacaagttttttgctcagaagatttcttga

SEQ ID NO: 14110 - RNA, 963 nt, synthetic construct
  source 1..963: mol_type = other RNA
atgaagacgagcccacccccccttttggtgagctttaagtccgctaagaacctcatcgatgctctgcctccttctgtgagcgagaagtacgaggatgagataaagtatttgaccgaaaagaacctaccccctgtggtttctgtggccgtggtcagtataatcttcggagtgagtagcaatttcgtagcctctattctcaggagaaaggagtctcagtaccgcaactttactatcaagaaaggaacaaagcggcgaaagattgaggcgccaaaagttggcctgaagatcttccagtcgtggatcggtcacaatcttagctccgcactgatattcccgaaatgtgtgttcggttttatcccagacatgaatggggtctttgaggccgctgatgtgcattgtgaaagtaaatgggtttactctcttgacctgagggacttctttacctcaatatcacgcgagaaagttaaatcagaactcattaacctgggctacagtgcccatagtgccgaattgatcactattttatgcacttatcaggggaggcttccccaaggttcccccgcatccccagtcctgtctaatatcgtcttccagaagaccgactcccggctcctgaaaaaatccgaagagctaggaattaagtacacccgctatgctgatgatctggtcttctcaggcatcaaccctatgccggcagcattacctgaactgattaaagaagtactgctggacgagggctggacaattgcggaggaaaaagagcacatcagctgcttaccaaatagactgaaagtgcatggccttctcgtacacggggagaagccccggctgacaaagggataccgaaatcgtattagagcctataaacacctgctcaacagcggcaaggtgaaggacgctgacttggatatggtgaatgggcacatctcctatgccgagaatctcgaaaggtttaacaactga

SEQ ID NO: 14111 - RNA, 1080 nt, synthetic construct
  source 1..1080: mol_type = other RNA
atgcaccgccgcgctccagctaagaggcagaggctcctccggatccgatgcctgagtgcaggtggtaataatgagagccaagattcctttgcctgcatgggcacccccccaccaccgattttagtctcttttaggtcttttgacgatctgctcgaggctctgcctgtggacggacgtgaggaatataggcaggaactgcagcaactgtacgataaggtccttccccctgttatatcaattagtatcctgtccgttctgtttggactttctgcctccttcatcgcatccatgctgagacgcccccacaaacattacagacacttcgtcataaagaaaggccgaaagagacgggagatctatgcccccaaggttggattgaaactcttccagagatggattgggcatcacctagctgaagctctcaattaccctgactgtgtgctcggctttgtgccccacaaatcaggcgtgttctccgctgctaacactcactgttccgcccggtgggtgtactcactggatttgaaggacttctttagccaggtcaccggggaacggctaagcgcacctctcatcggcttggggtacagtcagaagagcacctcaattattcttaaaatctgcctgttcaacggattcctgccgcaaggatcgcccgcaagcccagtacttagtaacttagcttttgaacctacagaccgcgagctgagcaaccttgcaaagcagcatggtgtgcgctacactcgttatgccgacgaccttgttttcagcggcgaagccctgccgcctgagggatttgaggcccaggtgaaggagatattggcggtgaacaattgggagatcgccaaggagaaagagcattttgccgcactcccagcaagactgaaagtgcacggtttactggtacatggcgcccgacctcgtctgacaaaggggtacaggaacaaaattcgggcgtatcggcatctattgaatacgggcagggtgaaaccaggggacctcgcgagagtaaaggggcacgtctcttattctgattgtctggatcacttcgtggaaaatggcgccttcgaacccaagtga

SEQ ID NO: 14112 - RNA, 903 nt, synthetic construct
  source 1..903: mol_type = other RNA
atgaatcatggtgataccgtgaaccagataaatgagatcgaaagattactggccatcggcctgccgccggtgattagcctctcctccttagccacaatgctgggggttagtgtcaacataatccagtacattgtacgccacccaagcaaactgtatgacgcatttgagctcaaaaaagggcgtaaagtccggcagatttcagctccacgagtcgccctcaaggtaatccagtcctggtttagtgttcatcttgcgaaggtcattccctatccaaatagcgtggtgggcttcagacccggtgtgcctggcgttttcgaaggcgcttcgagacattgccaggcatcttgggtcctgaacctggacatcaaggacttctttgacagcatcaatagggaacggctgaagaggcctctgctggagcttgggtacactgagaagtctgccgatttggtgctggatctttgcacattaagtgatcagttgccccaaggagccccttcctctccacccctcagtaacctcgcatttatgcgcaccgacaaacaactcgaagaggtttgttcacggttcaaggtgaaatatacccgctacgccgacgacctcatcttctctggggaaggtgagtttcctgagggcttcgacacagagataaaagatgtcctggcaggaaacgattgggaaatggctgagtcaaaggaacagctagtgttcgcacccaagaggttgaaggtgctgggacttattgtcaacgatgccgtgcctaaactgactaaagggtacaggaataaggtgcgagcttacaagcacgtgctgtccacgaagggaagcgaggctgataatttcgccgtactacaaggccacattgcgtatcacgactcattggttaagtttaacagcgactga

SEQ ID NO: 14113 - RNA, 1182 nt, synthetic construct
  source 1..1182: mol_type = other RNA
atgttgaatgcttgtctgtgctggcagggaaggaagaatggcaagttctcttttggggggagcgcctctgcccgagcttgcattacccccattagtgaggactacgtgcagaaagaagcttgcagaaaggccggagcgccctcaaatcacccccccttcggtcggctacatcagaggcgactgttcagtctggcctttgccgttaaagccctaccacctcctctttttgtttcctttgcaagcctgtcagaagccctcgaagctatgcccgtggtgtacagagacggcatccgcgccgtgatgcaacctttggtggaccagggtctgcctccagtccttagcagtggggtggttgccaccttattcggtgtgtccactacttttattagagctatcgccaactctcctgcacggtattacagagaattcacaattcgcaaaggcaagaaactccgcaaaatctcggctccgaagatcgctctgaagctgatccaaagctggatcggaacccacctgtcacactccgtcgtcctctcaaactgtgtgctcggatttgtgccaggccacaacggtgtcatagaggccgcagcgcgccattgttctgcgaagtgggtatactcactggatctgcgggacttcttccccagcatcgactccaatagggtgatccagagcctgttgaaattgggctaccccgaatcggcatccattctgataacacagttgtgcaccctgggagggagccttccacaaggctcccctgccagtccggtcttttctaaccttgtgttcatccagacggatgtcgagcttaatgcgatggcagaggagttcggcgtaagatacactcggtatgctgacgatctggtgtttagcggagagggggagcttcctgctgatctgcagacaagggtcagggattgtctcgataagcatgcatggcacatagccccagaaaaagagaaggtggttaaactcccccaccgtttaaaggttcacgggctactcgttcacggctccgagccacgcctcaccaaagggtatcgtaaccggattagggcatatcgacatttagtactggctggcaaggtaacagccgaggaccaagccaagatagcaggacatattagctatgctcagcaggtggaatctgcctccggctctcagatggcaccaagttga

SEQ ID NO: 14114 - RNA, 921 nt, synthetic construct
  source 1..921: mol_type = other RNA
atggacgaggctctggaagctatgccggaacggtttagggaaggtatccaacaggtcatgcagccccttgtagaacgggggctccctcctgccttatcagtgggtgtggtggccaccctgttcggcttaagtatcccttttattagggccatcagcttgaatcccgggaagtattacagggaattcaccattcgaaagggcaaaaaggaccggcgaatctctgctcccaaggtggcactcaaactgctgcagtcttggataggaacacacctgtcccactccgtcaagctagatgactgcgtctttggttttgtgccaggaaggaacggcgtgattgaggctgccagaagacatagcgaggcccgctgggtgtactcactagacttgagagacttctttccaagcgttaaaatcgatcgcgtcgagtctgcgcttgttgagctgggctattccataaactcagcctcgttcattgccacgctctgtacactgaatcaggcacttccacaggggagccctgccagtccagtgctcagcaacctggtgttcgccaataccgataaggcactggtccagatagctactgaagagggggtacgctacacacggtacgctgatgacctggtattttctggacagggaatcgtcccccccctgttgcaggatagagtttgtgcctgccttgtagaccacggctgggagatcgcgccagaaaaggaatccctcgtcgagctgccgaaacgcttgaaggttcatgggcttctcgtgcatggcgtgacccccagattgactaagggatatcgtaaccgtattcgggcttacaggcacctgttcgcggcagagaagattcagcctgcagacctggataaagtgaaaggccacctcagttatgcattacaagttgagaaagtgcctcaatga

SEQ ID NO: 14115 - RNA, 963 nt, synthetic construct
  source 1..963: mol_type = other RNA
atgaaagcccctcctcttctggtttcattttccgccgtggaggacttcgtagcgagcctgcctgacgcggttagggaggcacacgaaccggaaatcttaaaactccacagcgcaggtcttcccgctgtcatttcagttcgtgctatctctacccttttcaatatttccgctgagttcgtcaatgcgataagccgaactcctcagagacactatcgtaagtttcagatccggaagggcaagaagacccgggatattctggctccccgcgtggccttgaaggtgatccagagatggattgccacgcacctggcagccagtattcgactgccatcctgcgtcttcggatttgtccccggcaaatcagtaattgatgctgccagtgttcattgtgacgccacatgggtatattctctggatctgcgcgatttctttccaagcataacagcacggcaggtctacgacgcaatccgctccctcggatacagtgaagatgccgcctccctggttatgcaactctgcacactgaacgggtctttgccacaagggtcccccgcctcaccagtgttgtcgaacctcgtgttcagggacaccgacgtcttactgagttcactggcagccgccaggtctgtgaggtacagcaggtatgctgacgatctcgtgtttagcgggttggctcccgcaccagccgatttgcagaccacagtgaaagccgtgctgctggacgctggctggaagctagcaatcgagaaggaacatcttgcggcgctacctaaccgactcaaggtgcacggcctgctcgtgcatggtagttccccgagattaactaaggggtaccggaaaaaaatcagagcctatcgccaccttacccgggtcggcaaggtgaaacccgctgacgcaagcagaatagccggacatctggcttacgcttcttctatcgagaaatttactaagagcaaagagtga

SEQ ID NO: 14116 - RNA, 960 nt, synthetic construct
  source 1..960: mol_type = other RNA
atgaatacgcccccgctgcccttgctcgtaactttcagcagcctgccagacctgcttttggccctgcaacttgaggaagaagatcacgaacgcaaaactcagatagaggctctgcacaggaagtcactgcccccggtaacaagtacccttgcactctcaaccatgtttggcatatccctgaactttatccatgcgcttgcccggcatccagaaaagaattatcgcaagttcaagattcgaaaaggtaaaaagaaccgggagatctcttcacctaggatagccttaaagctcattcagcgttggttcgcccagcacgcaagctctgcgctggtcttcccagagtacgtgtgcggctttgtccccggaattaatggggtgacagaagctgcaaaaagacattgcaatgcaaaatgggttttcagcgttgacctgagggattttttcggacaggtgtccagggcccggatccataacaagctcgttgctttggggtacccagagtctggggctgatctgatttgtcaactgtgcctactggacgacaaactccctcagggctcgcctgcaagtcctttcctgagcaacttagctttccaagaaaccgacgagaaattgaatctcattgcctccaagtttaaatgtagatttagccgatatgccgacgatatcgtcttctcaggcaagaatgagtttgatcccattatcgagaaggaggtgaaggaactcttagaacaggagagatgggtgctagctgaagacaagacagagatctcccagctacctcacagactgaaggtccacggactcctggtgcacggcgacaaaccacgcttgaccaagggttacagaaacaggatccgtgcctataaacaccttctgtctaatgagcgcatccgggcggacgatatcaacaaggtgaaaagtcatatttcctacgccaacattatcgatagtatatga

SEQ ID NO: 14117 - RNA, 1110 nt, synthetic construct
  source 1..1110: mol_type = other RNA
atgcgcatcgcactggagtgtgagggccgtggacagaagggcgcctgtaggactacagccgatccttcaaacagacccccgtttgggcgccgccacaatgagtcccatcatagctttgccctcccagtgaacacaccacccctgctcgtgtgttttccatcactggataccgcaagtaacgcgttgagtgagagaacaagacaggcttacggggaagaattccgtgggcttatcgagaggaggctgccacccgccgtaagcattcgcatagttgctactttgttcggtttctctccttcatttgtgggtgctatggtgcggaggccgggaagatactacagggtgttcgagattcggtctggcacgaagattcggaaaatccaggccccccgtgttgccctgaaagtcatccagcaatggataggaggtcatttggctgtggccattccttatagatcttctaccttcgggtttgttcctggccggagccacatagatgccgcaggacagcactgcggtgcggaatggagctacagcattgacataaaggacttctttcaatccacctcagaagaggccgtacgaagggccctgatggaactcggctactctgaacatgcctcccacctcgtgtcctccctttgctgcgtcggcggttatctggcacagggggcacctagcagccctgctctgagcaaccttgttttcctcaattatgacattcagttcgaacagtacgcggccgagcatggcctaacgtatacaaggtatgccgacgatatcgtattttccggcagaggcgagatccccgcgagtcttcccgagctggccaagagaaccattgagtccggcggatggcaaatcgctccagaaaaagaaaagacccagcggcggccataccgactgaaagtgcacgggttgctagtggaggggatcagtccccggttaactaagggataccgccggcgaatccgcgctctgagacacctcatggagcacgggcgagtcgcagcagatcagctggctaaggtcgcaggacacttaaattatgccgaacaagtcgcttcatgggctaggaaaagtgaacgctcttcggaggtggacgagtga

SEQ ID NO: 14118 - RNA, 987 nt, synthetic construct
  source 1..987: mol_type = other RNA
atgaatacacctcccctattagtaacattccctagtcttgacttctttgtctcagccttggcagaagatacgcgatcgctgtatgaagccgagatacgcggcctggttgagctcggtttgcctcccgtcgtgtccttgcgaaccatcgccgtgttatttggcttttccccatcttttgtcggcacgctggcaaagcgaccagcaaggtactatagggtatttgaaatccggaccggaaagaaggttagatttatacaagcgcctaaggtggctcttaagctcattcaaaggtggattggcgggaatctagccagcacatttaactacttggactccacattcggtttcgtgccgggacgttcccatattgacgcggccgcaagacactgtgagagtaactgggcctacagtgtggacatcaaagacttcttccggactactagcgctgccagagtccgtactgcactccttaagctcgggtattctggtcgggccgctgatctgacagtcgccctgacctgctacgaggggttcttagcgcagggagctcccacatcacccgtgttgtctaacatcgtttttcgcgagtatgatcagctcctcgaagagctggcttgcgaactgaacctcactttcacccggtacgcagacgatatagtattctcagggaccggggccccaattgctgagctgaaggatcgggtgagaagcatcatcgaaagcggagggtggaaaatttccgagaaaaaagagaagctgttccagaagccctacaggcttaaagtgcacggcctccttgttgatggcaccgtcccacgcctaaccaagggatatagacgcaggatcagggccctgaaacacctgctgagtcagggcaaggtgcctccgaaacagctgcgcaaagtgcagggccatctgaattacgctcagcaggtggatagctggctggcctcacaagctgcaactgacggagacgaatctagctga

SEQ ID NO: 14119 - RNA, 1101 nt, synthetic construct
  source 1..1101: mol_type = other RNA
atgcgaatcgctttaatttgtgaggatcacggacagaaaggcgcctgtcggacagccgcagctccttcagatagacctcctttcggtcgcagactaaatgaatccaacctcagcttcgcattaccggtcaatactcctcccctgctggtgaacttccccagtctcgacttcctcctgaaggctctcgcagaagaaacgagggagattcatgccgacgagatcagattccttatcgaacgccagttgccaccagcggtcagtacaagggtgatcgcaacactctttggcttttcccctttgtttctgagtgcaatcgctagacgtccggataggtattaccgccaatttgagatccgcagcggcgctaagctgaggcagatccaatcgccaaaagtggcccttaagcttatccagcggtggattgggggaaatctggcaacatctctgacctatcccgactgcgtttacgggttcgtcccaggcagatcacatatagaggctgccgccaaacactgcggcgctgactgggtatacagtgcagacgttaaggacttcttccagtccacctcctttgacgccgtgcagcgtgcgcttaccgaggttgggtatcagcctaaagctgcccaattggtggccacctactcttgcttcaagggctttctggcccaaggtgcaccgagctctcccgtactgtctaacctggtttttctgccttacgatagacagctattagagtatgccgtccagtgtgatattacgtacactcggtatgccgatgacgtggtgctttcagggaggggtcagcccccagaagatctgaaggcgtttattcatcagactatagaagcgggaggttgggtgctcagcgagcgcaaagaaaagctgtccgtgaagccacaccgattgaaagtgcacggactgctggtcgatggggactctccccggctcaccaaagggtatcggcataggatacgagctttgacccacctcctggagaagggaagcgtatcacccgagactatgagcaaagtgctaggccacattaactacgccaagctggtcgccgagaagggacgggacgaaggacagggcggcgattga

SEQ ID NO: 14120 - RNA, 987 nt, synthetic construct
  source 1..987: mol_type = other RNA
atgaatacacccccacgactcatcttattttcatctctggacaagtacttgcaggctctgggcgatggcttcgatgaggctcacgtcgacgccattcggtgcctggatagcaaaggttatccacccgtagtcagtatccgggcattatccgtgctgttcggttaccgatcacagtttgtcggcgccatgcttaacagaccccagcattattataggcgcttccagatcaggagtggtaaaaaacagcgtagaatagacgcccctcgcgtcggactgaagatcatccagaagtggtttggccactatctggctagggccattaccatgccggacgtggtagtagggttcgttcccggccgctctatactgcacggagcagcaatgcactgccgggccaaatgggtttttagtacggacattaaagatttcttccagtccacccctaccgcgattgtcaagaacgcgctcgtggatattgggtataccgaacatggcgccgagatcgctagcggactgtcatctttgaatggggttctcgcgcaaggatcccctgcctctccagtgttatcaaacctggcctttctgaaggtggacaggcaactgcaagaatactgtcatgagagagggcttgtctacactagatacgcagatgacattgtgatctccggcgctggtaagccgagccctaacataagctccgacgttcgcggaatgatcgagacaggcaattggcagttgtccgaagagaagactactttgcttagcctccccaacaggctcaaggtgtacgggctacttgtggaccaggcccgcccaagactgacaaaagggtaccggcgacggctccgtgcaattcggcatctagtggatagtggcaagatcgatgctcagaatgatccaaaggcatatgaaagagcctgtggacacctggctttcgcccaatctgtggaggattttagcgacagggtgcagaaagactcgacatga

SEQ ID NO: 14121 - RNA, 963 nt, synthetic construct
  source 1..963: mol_type = other RNA
atgaatgcccctcccctcctagtctcgttcgactcactgcaccggctgtttctggcctgcggcgttgaggataattcaagcgcagccagttccctctcagcactggtggagattgggtttccacctatcgtgtcaaaggctacccttggggtactctttggttacagtcctcggttcataggagctatgtgtaaaaaccccgaccggtactaccgaactttctatctgccaaaaggaaatggcaagttcagaaggattgacgccccaagggtggctctgaaagttattcagaaatgggccggctttcacctggcaaacaatctgaagctgtctccctctgtggtgggtttcatcccgaagatctctgctattgatggggctgctcgccattgtagccaggactgggtcttttctaccgacatagagaacttcttccaaacaactgcccagagtcgcgtgacgcagtccttgatcaaattcggctttcccgcggaaggtgctgagttattttccaagctttcctgcttgaacgggaacctagcacaaggcgccccttgcagccctgtgttatccaatatctgtttcagcgaatttgatgtcctgatcgagaactattcccttgacaatgagctcgtgtacacaaggtacgccgacgatatcgttatttcaggtagggggaatccgccacccgatctcgaaaacaagatcctcgaaattgtaaccgcagccggatggtccatatctagtagcaagaccagattcagtcgtcgccccaaccgccttaaagtctatggcttgctggtttctggcgacgtccctcggctgacaaaagggtaccgtaatcgaattagagcgttgaggcacctggaaaactccggaaagctttctccagaatcggaggatgtggccctcggacatttaagctatgcaaagagcgtggagagatttggcctgggaagctga

SEQ ID NO: 14122 - RNA, 975 nt, synthetic construct
  source 1..975: mol_type = other RNA
atgaatattcctccgctgctttttagctttacaacccttgatcagcttattagtagtctggacgaggaaacgcgacattcaaaagaaaacgagatcgcttcactcttcaagaataaactgcctcccttggtgtccatccaggtcttatctactctcacaggcttttccatcccgttcatatatagcatgaccaataaaccagagaagtactaccggacattcatcatcagcaccggaaagaagaaacgtataatacactcccctcgggttagcatcaaaatcatccagaagtggctggctcaccacatctcctcttctgtgaacttcaacgagtgtgtttacgggtttgtgaaaaagaagtcacacattcttgccgcgagtaagcattgcggttcagattgggtctacagcgtggacatcaaagacttctttcccagtactacgattgaaaaggtgcgcctgggtctgattgatattggctattctgagaaagctgcagatctgatttcgaagatctccagcttcgaatcctgtttggcccaagggtcgccactaagcccctgcctgagtaatatcgtcttcaaaaacgtggacaataatttgtgcgagattgcaaagaactacgagctcacctataccagatacgccgacgacattgttttctcaggcacaggaaacaaaccatcccagctgagttctgcaataaaagatgagatcgaatctgctggctggaagctcgcccctgggaaggaattttattcagaccggaaagaccatctgaaggtccatgggctcttagtaaacagcaatcgacctaagctcggaaagaggtatagaaacagaattagggcctatgagcacctattgaggaatgacaagatatccccagccgacaagcccaaaatcatgggacacgtatcttaccgcgatagcgtggatactctgggcaagaaagaagatactacccccgcgtga

SEQ ID NO: 14123 - RNA, 1134 nt, synthetic construct
  source 1..1134: mol_type = other RNA
atgaggggcgggaacggggacaggttaagaacagccgtctgctgtgctcgcgtgtgcataacccttacatgcgaagacccaagcaccgagggaaggctgcccaatggcggacgaagctttgagtctcccgcagttcgacaagccgctagcaccaaagccacatccttcgcgctgcctgtgaataccccgcctccccttctgtattttggcagtgtggacgagctgatcgccgcattgtcccccgtgactagagagagatacgaatatcagattcgcactatctgcgacttaaatctgcctccagctgtttcaatccatgtgattgctacattgtttggatacagtcccagctttgtagtggctttgctcaagcgccccgagcgttactaccggatattcacaatccgtagcgggaaaaaaagaagagaaatcgtcgcccccaaggtgtctgtcaagattatccaacggtggattggaggcaacatagaacggcatatcgaatggctcccttgtgtattcgggttcgtgtccgggaggtcttccatcgatgccgccagcattcactgtggcgccgactgggtctactctatcgacctgagagatttttttccttcaaccacgagggcgactgtacaggcagcgctgactgacattggctacgagccacattgtgctgaattgatcgcacggctcagttgctatggaggacggcttgctcagggtgctccatcttcgcctgttctctcaaacctcgcgttcatgcgcttcgatcagagactcatggagctgagcaacgccttcgatgtcaaatatactcgctatgccgatgacatggttttctcgggcaacggaacgttcccagctgcccttaagggggagatagaggccgtgtttcgagatagtgactggaagtttgccggcgacaaagaatacttcgccgagaaaccatccagactgaaggtgcacggactgctggtggatggtggggttccgcggttaaccaggggttacaggaataagattcgcgcatttcgtcacctaatgtcaaccggccgagtccgcgaaaaggatgtctctaagatttccggtcacatcgcatatgcaaatctagtgctgaggaaagcaggccggtga

SEQ ID NO: 14124 - RNA, 1089 nt, synthetic construct
  source 1..1089: mol_type = other RNA
atgtgcatcacgctcatctgtgaggatcgaacaatcgaggggagacttaccaatggtggacgctcctttgagtcaccagctgtgcgtcaagcagcagccactaaggctactagtttcgcccttccagtcgatacaccactgcccctcctgtttttcgagtccatagacgaactggttggcgccttgtctcctttgaccagggagcggtacgaacctgaaatacgaaggctctttgatgccaggttgcctcctgccgctagcatccatgttgtggcaaccctgtttggctactcgccctcatttgtggtcgccctgctgaaaaggccggagagatattaccgtacgttctatatcaaaagtggaaagaaagtccgcttaattaacgcccccaaagtttcaattaaaattatccagcggtggataggtggcaatatcgcgcgcaatgtccagtggctgccctgcgtgtttgggttcgtgccggggaaaagcagcgtggacgcagcgagagtgcattgcgaagccgattgggtgtacagcgtagacattaaggacttcttcccctccacacgctccgaatctgtgcaagttgctctcattaaactaggttataaacctcacgcagccgagctaatcgctcgcctttgttgtcacggcgggcgtttagcccagggagctccatcaagtcctactctttctaatctggtcttccagcccttcgacgaacagctgcaacggctcgcggatactctgaacgtgaagtacacaaggtacgcggacgacatggtgttttctggtgaaaacgccttcccagaaaaactcaagaacggcgtatccgaaattttcttaaagagcgattgggtatttgcacaggagaaggagtattttgcaaagcggcccaccagactgaaggtgcacgggcttctcgtcgacggacgggttccacgcttgacccgaggatatcagaataagattcgggcttacaggcacatgctggaggctggcaaggtggctaagacagatatcgagagaatcagaggccatgtcgcctatgccgacctgatagagaagaagactaacctgaccaaatga

SEQ ID NO: 14125 - RNA, 978 nt, synthetic construct
  source 1..978: mol_type = other RNA
atgaggttgccccatagtctcttgtccaacccgttctttcagttttctagactgtctgatctccttgcagttctgggaaacgaggtcggcgagctggagatcgaagaaattgagcacctctgctcaattggcctaccgcctgtcacgagcgagaatgttatatgcgccgtctttggattcaatcccgggttcgtgtggagcctcctgaacaaaaagcacaaatactatcgccgtttcgaaattcctaaagggcagggcgtgagggtgatatatgctccacggctgggcctcaaggtgatccagaagtggctgtcattaaggctgtcagaattttgggtccctgatgactccgtctacgggttcgtggtgggcagatcacacgtggacgcagcagccaggcattgtggagctcggtgggcttttagctgtgatatcgaaaacttcttccctagcacaagccaggcgtccgtagagagagctctgattggcatcggatacaaggagaaatctgccaagctcatcgccgaagtttgctgttaccaaggtgccttagcccaagggtcccccgctagtccagtgctgagtaatatttgcgccgctggtctggataaaaagatgcttgccgtccgagacaaatatggctgcgtctatacccgctacgcagacgacatggtgtttagtggcgagggggagatgcccagagagcttgaagcggatgttttgtcctgtttcgatggtgaagagtgggaagtggccgaagggaagacttactcggcagtttatccaggacggatcaaggtgcatgggctgcttgtaggtggcggagtaccccgcctgaccaagggatacagaaatcgattgcgcgcataccgtcacctgctagagcgggacgccgtagtgaagaacgctagcgttgtgatgggccaccttgcctatgaggactttgtgaggcggaaagcgttaccagagtctgaatga

SEQ ID NO: 14126 - RNA, 969 nt, synthetic construct
  source 1..969: mol_type = other RNA
atgagattgccccaatcactgatttcatctccactgttccagtaccatcgagtcagtgatctcctagctgcactcgacggtgagatcgacgatgaggaagttagcgaaatacagcggttgagtaacctggggctgccccctatcacctccgccaactgtttagccgctatttttggcgtgaatccaaagtttatctggagcctctgtaacaggcgctccagacattaccgacacttctccattcctaaagggtccgggatgcgtgacattcacgctcccagagtggggctgaagctgattcagaaatggttatcagtccggctcagccaattctggggcgagcgcgagggagtgtatgggttcgtaactggccgctctcatgtagatgctgccgcccagcattgtggcagtgattgggtccttagctgcgatattgagaactttttcccgagcaccacagaactgttcgtgatacagtcgttggaggcgatcggatacaggcactcgagcgccgcgcttatagctagcctgacatgttatcagggtggacttgcacagggatctcctttgtcccccatcctttccaacatttgcttcaatttcctggacatcaaattcttggtcctcagggactcaataagtggagtgtacacgagatacgcagacgacatcgtgttttctgggcggggcggttttcctgaaggcctgctggaacagattaggaattgctttaaaggcactccgtggtgcttagcagataataagaattacaaggccatccgcccatgcaggctgaaagttcacggccttctggtggatggggacaagccacgtctaaccaagggttatagaaacaaaatccgggcctattcttacctcgtggacaataagaagattaccaagcacgagtctatcatcctgggacacctcacttatgccgagtttgttacaatccatcaacagggctga

SEQ ID NO: 14127 - RNA, 1032 nt, synthetic construct
  source 1..1032: mol_type = other RNA
atgaggaagcaattagaagcactattgtctatgagacttcccccgtactttttcagcaacccatatgtggttttccccactcttagtgactttatcaagagcttggaaggcgagattaccgacaccgagctgcaggaagttaatcgactggccgccctcaacctgccccctgtagtgtcggggagtgtggttgccgccatctttggagttaatccaggcatcgtgtgggcgataatcaacaaacctcacaggtactacaggaccttcaatattccgaaaggaaacgggcagcgggagattcacgcccctagagtggtgcttaagatattccagaagtggctatctgtacgtcttgcagatgcttggcgcccagcggactgtgtctacgggtttgtggcgggacgcacatatatcgacgctgctatcaaacataagaacgccaagtgggtgttcagttgcgatattcaagaattcttccccagcacacctagtatctatgtcaaagaatgtctccagagactcggttacaatcacgaccaggccgccctggtgtcctcactgtgctgtttcagaggaggtttggcccagggatccccagcttcacccgtgttgtctaacatatgcgccgatgaccttgataagcagttactgcgcgtggccgagaaatatggctgcaattacacgcgttatgcggacgatgtcacgtttagcggatctgcagaggtccccagcgggctcactgacgatgtcgctggcgtgtttcatgcaagcccatgggagctggccccagggaagacaaaactgtccgtctcccctgctcgactcaaggttcatggcctgctggtgcacacaggcactcctaagctcaccaaagggtaccggaataagttaagggcttatcggcatctggcagcacacggtaaactgaccaaaaacctctcaaaggtcaatggccacctgtcctacgcagctgacgtggatcgccgggtagctgccgataatattgaggtagagaacctgtttggcccctga

SEQ ID NO: 14128 - RNA, 972 nt, synthetic construct
  source 1..972: mol_type = other RNA
atgcggctacccctccacctgcaaagttcaagatactttacattcggcaccctgcaggagttcataaaggcgtcaggcacctctacggacgctgaaattgctgaatatgaacgactggaggctctgggcctgccgcctatcagctccaggcattctctggccctgatgctgggggtaaacccagcccttatttggagcttcgaggcacggcctcaccggttttatcgaacttttcacattgctaagggcagatctactaggcgcatagacgcccctagggtcggattgaaaatcgtgcagaaatggttgtccgctcaattacaggcggcctactctccacccgagcatgtttacggatttgtgcccaaccgcagccatgtgcaggctgcctccattcactgcggagccgaatggattctgagcgctgacatcgctgattttttccccagtaccccatttgcgctggtggaggccaatctgaaacgccttgggttcaatgagtatgccgccagaacaatcgcttccttgagctgtctcgatggggcacttgcacagggggcccctacttctccggtgttatcgaatatatgctttgacgagatggacaaggccctactggcactcgcaaccaaacatcaggcccgcctcagcaggtacgccgatgacatcgtcttctcaggttccggcgaggtgtctgaaaccttgatctccgaaatccgagacttattcgtacagagtccatgggagttgtccgaaagaaagtttgtcctctcgcgtcggcccaaccgcctgaaggtccatggcctactggtggaggataagaggcctaagctcacaaagggatatagaaataaactcagagcgttcaggcacctgcttgcaaacggtcgggttcgtagcgcaaaggatgttgagattatggccggtcaccttgcatactcagatttcgtggagaaaagtttcgaaacatga

SEQ ID NO: 14129 - RNA, 1116 nt, synthetic construct
  source 1..1116: mol_type = other RNA
atgcagcatgctcattgcgccaagaccaacgacagacggatgcccagcttcggccgatgcagctttgaaacacagcccaagcgaaggcacctcgatgagtcacaactgtgttacatgcgcctccctcatcaactacttgagagccctttcttcctgttttctcgcgtcgaagaacttgtcgaggctatcggtctggagacaggcgatgacgaggccatacagctgagagcgctgtccgaacggggattgccaccggtgacatcggttcactgcctcgccacgatgctgggggtgaaccctgggctggtgtggagtttgataaacaggccacaccgttactacagaacattcgagattccgaagggcaggggtactaggcgcatcactgccccaagagtcgcactgaaagtcatccagaagtggctgggatatcatctggccagagctgcctctacccccccacacgtctacggctttgtgcccggcaggagccatatcgaagccgctcacgtgcacaggggcgctgaatgggccctgtcagtggacatcgctaatttcttccagaccacccccagttccttggtgattaatacattagagcacctgggctatggagttggtgccccactgctggcctcactcacttgttacttaggctttttggcacagggggcgccttccagtccggttctctccaacctttgtttcgcggcaacggacgaggtgctcgtgcgcttgagcgagcgttacggttgcaaaatcactcgatatgcagacgacgttgtgttttctgggcaaggtggcatgcctggaggactcagaagcgagctgcgggggatttttgcagctaccccttggaaactctcccctgagaaggaaagtgtacagcccatcaaaggccggattaaaatacatgggttactggtcgatgggccacatgtgcggcttaccaagggctataggaataagctccgcgcatacgaacacattttgcttactagaggaggggaagccaccgatcggcatgtactgtctggacacgtacagtatggacaccacgtggaagccattctagagcgtctagctctttctcgcgcaaatgagtcacccgattga

SEQ ID NO: 14130 - RNA, 1128 nt, synthetic construct
  source 1..1128: mol_type = other RNA
atgagattgccgcagcacctactggcatcccccctgttcgtgttcaagaatgcggaagagcttatcggggccatgggcgatcgatccacaccggaagccatcggcgacatcaggacactctctgcccaggggctgccaccagttgtgtcagaggaggctttggcagcgatggtgggaatcaactctggcctggtatggagttttctgaaccgtacctggaaacactaccggacgtttgagattcctaagggcaatggcgtacggcagatcaacgcgcctcgtgtggccctcaagattgtacaaaagtggttgagtgttaatctggccaaattctatgaagcccccgaacatgtcttcggttttgttgccgggcggagccatattgatgcagctatgaggcacattggagccaaatgggccttcagcgccgatatttctgactttttcccttcaacacccgaggccatggtggcagaagccctccagaccatcggatactccgaccagagcagtcgcatcatcgctagactcggctgtttgggagggcgccttgcacaaggtgcacccacatcacctctgttcagtaacctgtgctttcgccagatggatagcgcagtcctggagctgtcgcataagtatgaatgccgcctgaccaggtatgctgacgaccttgttttttccgggcagggagacttccccaatactatacgggacgacttgactgcactgtttgctaacggcccgtggcacctggctcctcagaaaatgttagtgcagccactgaaggggagaatcaaggtgcacggtctattagtgaatgattctggcgtgaggctgacccgaggataccgcaaccagatcagagcttacgcccacctcctcgccactaggggggatcaagccatggaggcgccaaaattaattggccatgtcgaacacgctagacatgtgcagagggtgaccgggagcccctcaggtatatctaagaatgagggtgtcgaacgtgagcgcatcataattcctccaggaattattctcccagaccgacaacctagcgctgatgatcggcggcccgaggctcagaatgagtccttcgtcggctggcttaaaagaatacttaacttttga

SEQ ID NO: 14131 - RNA, 978 nt, synthetic construct
  source 1..978: mol_type = other RNA
atgagacttccgctgccactccttaactcgcagtatttccagttcagcagtttcgccgagttaagaactgcccttggcgactcagtgtcttctgaggagctccaagaggccgcaaggatcgtattgggcgggctgccccccatcacatctaggttgacgctggccgctatgttgggtgttaatcccgggcttatttggtcctttgagaacaggccccagcgctattaccgcagtttcagcatcccaaaaggaaggaccacacgacagattgacgccccaaaggtcgcactcaaactcatccagaagtggctgtccgtccagctggcaaggacttttgaacctgctgaccacgtgtacggctttgttggcggacggagtcatgtgcaagcggcggcacaacatgttggcgctcagtgggtgtttagcttagacattcaggatttcttcccatcaacccccattcgactcgtggtcgagagccttaaaagtctcggatttggaagcgatggggcatccctgctatctcgtctggcatgcctgcgaggtgctttggcccagggagctccatcatcgccgatactgtccaacatctgtttccaacagatggacggtcagctcgcccaaatcgcccagaatgtgggcgccagactgacacggtacgcggacgatgtggtattttcagggataggcgagatgcctcctacactagaaaatgatgtccgcgctatattcaccgacagcccttggactctggccgaacataagatccgcattgcccaggtgcctgacaggctcaaggtccacggccttctggtgcacggagcccagatccgtctgaccaaggggtatagaaacagactgcgcgcatatcggcacttgctgcacgaaggtaaaattcgggatgatgacctggctaaggtgtgcggccatttaagctacgctgcgtccgttgagcgggaatccgatgggacctcttga

SEQ ID NO: 14132 - RNA, 975 nt, synthetic construct
  source 1..975: mol_type = other RNA
atgaggttgcccccatcactgctgaatagtcagtatttcctgttcagcaacttcgccgagctgcgtaaagctctgggagattctgcatccagcgaagagctcgaagaggctgcaagacttgtgctcgcaggcctccctccgataacctcgaggttgaccctagcagccatgtttggtgtcaatccgggattgatctggtcttttgagaacaggccaagacgccattaccgaagtttttccatccctaaagggcgaaccactcggcagattgacgccccaaaggtcgcgctgaagttaatccagaaatggctttcagttcagctggctcgtacttttcagcccgcagaccacgtgtacgggttcataagtggacgtagccacgtgcaagctgccgccagacatgtcggtgcccagtgggtgttctccgtggacatccaggactttttcccttctacgccagttgatctcgtggctacagcattagaagcgctagggttcgggagagacggcgccgttttgcttagcagactggcatgtctgaggggtgggctagctcaaggcgcgcctacatcccccgtactcagcaatatttgctttcagcacattgatgggcacctggtacaaattgcccataatgccggggctcgcctttcccggtacgctgatgatatcgtgttctcaggaattggcgacatccccccaatgttggagaacgacgtgcggacactgtttgatggatcaccttggactctggcggagcaaaagatccggaccgtccgagcccccgataggctcaaagtgcacggactgttagtccacggtgcccaggttagactcacaaagggctatcgcaacaggcttcgcgcatatcggcatctgctgggcgaaggcaagattcaggaagccgacctcgccaagattcgcggccatctgaactacgctgcctctatcgagcgggatggcgacgagatatga

SEQ ID NO: 14133 - RNA, 942 nt, synthetic construct
  source 1..942: mol_type = other RNA
atgtacacaagcctcggcgagctctcacgtgccttaggtgatgccgcacgccctgaggaactggcagaaattgaaaggctcgtactccttgacctgccacccgtgagttctcgaatacaattagcaaccattttcggagtcaatcctggccttatctggtcctttgaaaatagaacccgcaaacactataggagcttctttattcccaaggggcagactactcggagaatagacgccccaaaggttgcactgaaggtgattcagaaatggctgtcagtccacttgtctcacggctttaagccagcagatcatgtgtacggcttcgtgtcagcccgatctcatattcaggctgctacccttcatgtggatgcccagtgggtgttctccgtggatatccaagacttctttccgacaacccccatccagctcgtgtcggacagcctggaggctattggattcgggagagatggggccatgttagtagcccgtctatcttgcttggccgggttccttgctcagggagcacctacaagtcctgtgctgagcaacatctgttttcgcctgatcgatgaagcattgatcgcgatagccgctcggtactccatacggctgaccaggtacgctgacgacatcgtcttttccggcactgaggagtatcccgcgcagctggaaactgatgtgagggccctgttttccgttggtccatggacattggcggagcataaagttcgcgtcaacaaactaccggagaggctgaaggtacacgggctgcttgtgcacggacccaagattcggctgacgaaaggctaccgaaacaagctgagagcttatcggcacctcatgacgcatgagaaggttgccgaagcggacatcgctaaaatcaaaggtcacctcaattatgccgctagcgtcgataagttcagagacgccagtgaggactga

SEQ ID NO: 14134 - RNA, 975 nt, synthetic construct
  source 1..975: mol_type = other RNA
atgaggctcccacaaccgttattggattcccagtactttctcttcagcagtttcgccgagctgtcgaaggcacttggagaagccgctcacccgggtgaactcgcagaagcggaaaggctggtactgcgtgggttgcctcccgtcacttcaagaatggccctggccacaatgttcggcattaaccctggactgatctggagctttgagaatcggcccagacagcattatcgctcattctctattccaaaaggcagaactaccagacagatcgatgcgcctcgggtcgctttaaagctcgtacagaaatggttgagcgtgcatctgagccgggcctttcagccagccgagcatgtctatgggttcgtctccaatcgtagccatgttcaggcagccgcccgtcatgtaggtgcaaggtgggtgttctccgtggatattcaggactttttcccctcaacacccgttgatctggtggcggaaagtcttcagaccatcggtttcgggcacgaaggagcccgcctgctatctcggctggcatgcctaaggggcgccttagcccaaggcgctcccagttctccagtcctgtctaatatttgttttcagcacgttgacgagcagctcatccttatagcttcccggtacggggtgcgcctgacacgatatgccgacgatatagtgatcagcggtacggacgagttgccacctaccctagagaacgacgttcgggctctgttttcacagggaccctggagactcgctgaccaaaaaactcaaatagcacaactgcctgacaggcttaaggtgcacggcctgctggtgcacggcgagaaaatcagattgacaaagggctatcgaaaccgacttcgcgcctacaggcacctgatcagtcgcggaggcattcaggacgcagatctcgctaaagtgaagggacacctcaactacgctacctccgtggacaaggaggggggggatgcatga

SEQ ID NO: 14135 - RNA, 912 nt, synthetic construct
  source 1..912: mol_type = other RNA
atggatgaattactgaaagcatctgcaggtgccgtgccagaggctgagatgaacgaagccagaagactggtcaatctggggctccctccagttacctcacgcatggctctcgccacgatgtttggtatttccccaggcctgatttggtcctttgaatctcgcaccaggaaacactaccgcaccttttttatacctaaaggaagcgggaagcgtcgaatcgatgcgccccgcatagccctcaagatcatccagaagtggttgagtgtgcacttgcagaagtgctatcagccccctgaacacgtgtatggattcgtgtctgctaaaagtcatgttgcagctgctgcccgtcattgtggggcaagttgggtgttctcagtcgacctaaaagatttctttcagagtactcctgaggtggtcgtcatcaactccctggagcgaatgggattcgctgtgaacagcgcgactctgctggccaagctatcctgtctcaatggaaccttggcacaaggcagcccgagctctcccgtattatccaacatttgcttcgagcatgttgatgagcagctgctcaagattagcaagatgtacaatgtgcggctgtcaaggtatgcagacgacatcacattctcaggcacaggcgtgtttcccgccgcccttccagaggaagttctcggggtcttcgaagagggtccgtggaggttagccgaacagaagactgacctggcgatgcttcccaacagacttaaagtacatgggttgctggtgcatggcaaccacgtccggctcacaaagggatacaggaatagactgagagccttccggcacctgctgaagaatcacaaagtatcggatatggaccttgctcgggtgcaaggccaccttgagtacagcgaatttgttgagaggttctga

SEQ ID NO: 14136 - RNA, 966 nt, synthetic construct
  source 1..966: mol_type = other RNA
atgcgcctccctcatccactcttaaactctcaatttttccagtacgcatcactttctgaactcttgaaagcaacagagcgggctctctccgaatcggaacgcgagcttatgctgcaattgtcagggaaaggcctgcctccgatcagtagcagggcggcactggcagccatgttggggataaatgaaggcctgatttggtcctttgaggcaagacccggccgacattaccgtaccttctatattcccaagggaaaagatgtgaggcgcatcgacgctcctcgggtagccctgaagatcgtgcaaaagtggataggttttcagctagccaaggcgtatttgcccccagagcacgtttgtgggttcgtggagggcagatcccatattgacgcagctcgtattcactgccgcgctacatgggtgttcggagtcgacatccagaactttttccctaccactccaattgatgtggtggcaagggccctcctggatatcggataccacgagctgggagccgttcttatctctaggctgtgttgcttcgaaaacgcgttagcgcaaggggctcctagttctcccatactgtccaacatgtgctttgctagctacgatcagcgactgaaggctatcgccgacaggtatggagcaagactgactagatacgccgacgatatcgtgttcagcgggcaggatgactttcccgtcgcattaaaagaggaggtacttggtatcttcgccagcgggccgtgggccttgagtaatcagaagattaagctggccgtgtggccacagcggctaaaagtccatggcctgctggtccacggcgaccagcttcgactcacgaagggttaccgcaatcggctccgggcctatgagcacctcctagctgctggcaaaattagggccgaatcaatcagcgtcgtgagaggacacctgggctataaggaccaggttgccaaaagagcctga

SEQ ID NO: 14137 - RNA, 966 nt, synthetic construct
  source 1..966: mol_type = other RNA
atgaggcttccgcagcccctcctggacagccagttctttcagttctcctctctcgctgaactgctgaaggccacaggagagttggtcccaccctcagagcaggtgcaaatgcggcgaatggtggatagaggccttccacctatcacatccagggccgccttgagtgcaatgcttggcatcaatcccggtcttatgcatgcctttataacatggccccaacgctactatcgtacttttgaaatcccaaagggacgtcggggcgtgagaaggatagatgctccgagggtcgggctgaaaatcatccaaaaatgggttgccgagcgactccaaaactgttacgagcgccctgaacacgtttatggattcgtgtccggcctgagtcatgtacacgctgctgcacagcactgcgaggcaacctggacttttggcgtggacatcaaggacttctttcagaccacccctattaacgtggtcactaagtgtctcctacagattggattcgacgaaaatggtgccgctgtagttgctagtctctgctgcctgaacggagtgttggctcagggcgccccatcatcacctgtgttgtctaatatctgtttcctgcacgtagatcagcggctcgcagaactggcggccgagtttggagttaggctgacgcgctatgccgatgatattgtctttagcggcatgggtgagtttcccgagcgtctgcagacagaattattcgccattttcagctctgggccttggcgactgagcgagcggaaaacccgcctggacaaactgccaaacaggcttaaagtgcacgggttactcgtccacggggaaagagcaagactaacgaaggggtacagaaatcggctgcgcgcgtatgaccatttagagagaaccaagggggaagacgtggaggatgcggacgtcattcggggtcatctgtcctacggcaagttcgtggagtcgttgtga

SEQ ID NO: 14138 - RNA, 963 nt, synthetic construct
  source 1..963: mol_type = other RNA
atgcgtcttccccagcccctgatcgaaagcaagttttttcagtttgagcgcctcgccgatttagagcgcgcgattggcgagcatggaagcgccctggaactcgcagaaattcgcaggctaactaatctgggcctgccgcctatcgcatcctcgagcaccctcgctactatgcttggagtcaacagggggctgatttggagtctggtgaacagaccccggcggtactacaggcgattctcaatacccaaagggaaagaagagcgcataattcatgctccaagagtggccctgaagattccacagaagtggataggagtgcagctctctaactatttcagggctccagctcatgtgttcggcttcgttcctcaccggtcccacgttgacgccgccagagtgcatttgggcgccaaatgggtcctgtctctggacatcgagaatttctttccgtccacccctcaagagcttgtagagcaggcactggtcaatatcggtttcggagaagcaggcgctaatctaattgcttcactggcctgtttcaacgggtttttggcgcagggatctccttgctcccctacactgtccaactattgcttttcaccctgggatgagtctcttgcgttattggctgctcgagaaggcgtgcgcattagtcgttacgccgacgatatcgtgttaagcggtcacggtacaccacttgacgggctgcaggaacaaatcgccgccacactggccaatagtccatggcgactgtcacagaggaagatcagcttgagtgtggcacccgcacggctcaaagtccacgggttgctggtaagcggagacagagtgcgtctgaccaagggctaccggaacaagctaaggaccttcgagcacatcctccaaacgagagaaaatctcgatgcgaagttcgagagaaaagtccgggggcacctcgcatatggcaaatttgttgaggcctga

SEQ ID NO: 14139 - RNA, 981 nt, synthetic construct
  source 1..981: mol_type = other RNA
atgcggttgcctcacctattcctcgacagactctgcttcggcttgtcaggtcctgaagagctgttacgagtgctggggcccttagcatcacctggagaagatgagtgtataagaagactctgtgcgctggatctgccgcctgtgtccagtcccagggctttggctgccatgctgggcgtcagtgagggacttgtctggagcatgctccaccggcagcatcgccactatcgccatttttccatcccaaagggaaggggtagccgggacataacggctccccgagtagccctcaaggtgattcaaaagtggctggcggtgagactccaggcgaaatactacaggcctggccatgtgttcggcttcgtgcccgggctttcgcacatcgacgctgctcgtcagcatctcggagccaggtgggtgtgtagctttgacattgagaacttcttcccgacaactccagagggtctggtcgcagcccgtttagtagatctcgggtttccagagtctggcgctgggattgtggctcgactggcctgcttctcaggtgtattggcccagggagccccaactagccccgttctgtccaatatcgcattgtgcgacatcgatcaacgcctcagtctattggctgagcggtacagtctgagactgacccgatacgccgatgacattgtttttagcggccttgaggcagtgcccgaccagcttgcacgcgaagtgtatgaactattcgccgctagctcctggaggctgtctgaagcaaaaaccgagagagtcgaaatcccttcacgccttaaggtccacgggctgcttgttcacggcgaggaagttagactgacaaaggcatatcggaataggatccgtgcctatcgctacctgatggagaggaacggaattcagcaggcggatctgccaaaggtgaaaggccatctgtcttttgccgaatctgtccggaaagccgggggagcctcctttggctga

SEQ ID NO: 14140 - RNA, 981 nt, synthetic construct
  source 1..981: mol_type = other RNA
atgcggctcccccaaccattgctggacagcccatattttcagttctccactgtgaatgagctttgtaaggccgctggtgaccctgacagcgcggaagtgatggagatcaggcgccttgacgcactgaacctgcctcctgtttcctcccggcagatactcggactgatgttcggactcaacagtggactgatttggtcttttcagtctcgcacccataggtattacaggacattcaatatccctaaaggcaatcggcagagaagaatcgatgcaccgtgtgttggcctcaaggctattcagaaatggctggccacacagctgcagggcgcctataaggtaccggaccacgtctttggttttgttgctggccgctcacatatcgacgctgcgtctgtccatgcccaggccgtctgggtgctgagtgtggacataagggatttctttcaaaccacgcccaagtctctagtcaaaacccgacttctggaattgggattcctcgaaaaaggggcagagttaattgcttcactgtgctgcctgagagacaacttagcccaaggcgcacccacctcaccactactgagcaatgtgtgctttattcacgtggatcaacagttgagctacctggcggataaatacaacctccgtttgagcaggtatgccgacgatattgtgttcagtggtaagggacagtgtccagatacccttcgggacgagcttgagtcccttttcatcgggagcacctgggtgttggctcccgagaagactgagctcgtctcgctgcccaaacgcctgaaggtgcacgggttactggtacacggcgaaaatatcagactcacgaaggggtatcgtaacaagatacgaacttacaaacacctattggcaacaaaaggggccgagctgacaaattcagaaaaaatcaagggccatatttcctacgaaaagtacgttgatctcgtggtagatgcccagagaaacacttga

SEQ ID NO: 14141 - RNA, 945 nt, synthetic construct
  source 1..945: mol_type = other RNA
cggcgaaccttttataggcgatcaacaaaggaaaagctttgttatatgcgactaccccagctacttcaggaaagtcagtttttcttgttttctggcgttgaagagctgctgtcggcacttggctctgtcatcgacccggcggagaagcaggaggtactgagactggcagacctggggctccccccaatttccagtaaagatgccctcgccactatgctgggaatcaacccgggactgttatggtcttttgaaaatcgcccacagaaacattatcgcgtgtttaccatcccaaaaggcgccggccgtgagcgtacaatagtcgcccccaaggtggcattaaaggtgctgcaaaaatggctgtcaatccagctccaaaggaattacgtgcctcctaaccacgtgtttggattcattcctggccgcagccacattcaagctgcccagaaacacctgtgtgcaaggtggacctattccgtagatatcgaaaattttttcccaaccacatcccgcgatgtcgtgtgcgaggtgttcttgcagttggggtactctcccgagagcagccagatgctggctggtttctgctgctacaagggcttcctcgcccaaggggcccctactagtcccgtcgtgagtaaccttgcgttccggaacatcgatgagaggttggttcagctggcagaacggtttggggttaggctcagccgctacgccgatgacatagtgtttagcggtattcacgatttccctgacgagttacggattgacgtagacagaattttcggagattccccatggagactgagccccgacaagactgagttcgaccagttgcctcggaggcttaaggtgcatggtctgctcgtccatggggaaagagtgagactaacgaaaggatacagaaataagctccgggcttatgctgctgtttcactgtacacatcctga

SEQ ID NO: 14142 - RNA, 972 nt, synthetic construct
  source 1..972: mol_type = other RNA
atgaggctgccaccactgcttctggaatctcagttcttcttgtttagctcactggaagaattgctagcagccttaggggacagcgtcgccgagctggaaaaggaggaggtggcacgacttgcggctctgggcttaccacctatctcgagtcgggacgctctcgcgaccatgctggggatcaacccgggcctcgtgtggtcctttgaacacaggtccgccaagcattaccgcaggtttacgattcccaaaggcgctggacaggagcgggtaatcatcgcccccagggttgccttgaagattgtgcagaagtgggtaagcgtgcaactccaacgcgcttatgccgcacctcaacacgtgttcggatttgtgccagggcgctctcatatcgacgcggccaagcagcatagactggctgagtggacttactctgtagacatagcagatttcttcccgtcaactcctctcagaacagtgactgccgtgtttaatcggctcggatatggggatgaggtcgccagcatgcttgcctccctgtcttgctaccagggcttcctggcacagggtgctcccacaagccccgtcatatccaatttggccctgcacgaggtggacagacgtctgattgacatctcacggtcatttgatgtgagagttagtcggtatgcagacgatattgttttttccggccagaacgggttccctgaagaactcgtcgatgaggtgaacgagattttcatcgacaccccctggaccataagtcaaggaaaaacagagttgaataggctccctcgcagactgaaggttcatggccttttagtgcacggtgctcaggccaggctaaccaaaggctaccgaaataaactccgtgcttatgctcacctgattaaaaacggtctgatccaggaaggacataagcttcgcgtcaaaggacacctacgatacggtgagcaggtcaaggaggccgcagattga

SEQ ID NO: 14143 - RNA, 972 nt, synthetic construct
  source 1..972: mol_type = other RNA
atgcgactgcctctgttccttcaggactctcagttctttttattcagcagtgtggaggaactggtggctgccttgggagattccgttgcagtggtggacaaggaggaggtgaagcggctagcagagctcgggttgcctcctgtctgcacccgggaagtcctcgccacaatgctcggcattaatcccggcctcctgtggtcatttgagtaccgcccggataagcattaccgcatatttagaataccaaaaggcgcccgcggcgaaagagaaattgttgcaccacgggtcgctttaaaaatcctgcagaaatggctatctgtgctcatgcagcgtcactacgctgcgcccgatcatgtattcggattcgtgagtggtagatcgcacctggaagctgcgaaagttcacagaatggctcactggaccttctcagtggatatcgctaacttctttccctcaacgccagcctatgtggtcgccgaggcgtttgaatccattggatttggtgccgagtccgccgaaatgctcgctagactcacctgttatcgggggttcttggctcagggagcacctaccagccccgtgatgtctaatatcgccctgagagccgtcgacgagaagttgtccgacatctctcgaaggttcggggcaaggctgagccggtatgccgatgacattgtgttcagcggtgtagaggagtttccagagggtctgcgagccgaagtggcagacttaatgacagatactccttgggaactgagtgcagagaaaactgaatttaaccaactgccggggcgtctgaaggtacatggggtgcttgtccacggaccccaaatcaggttgacaaagggctatcgcaacaagctgagggcttacgcccacctgagcaaacggggccgtatccgccaggacgatcttcttagggttgccggccatatcaggtacgggattcaggttgaggaggtcgcggactga

SEQ ID NO: 14144 - RNA, 996 nt, synthetic construct
  source 1..996: mol_type = other RNA
atgcggttaccacacagcttgttagagtctcagttcttcgcccttacctcagctaaagaactggtaatcgccatgggggactcactgagcgaggaggagtcggatgaactacaccgcctcgcagggctcggattgccacctgtttccagtgccctggcactcagcaccatgatgggtattaatcccggactgctctggtctatgctgagtagacctactcgccattaccgcagattcacgattcccaaggggaggtcagagcgcgtgatcttcgctcctagggtggcattgaaaatcatacaaaagtggctgagcattcactttgagaaacgttttacaccactgccacacgtttatggcttcgtgcgagggaagtcccatatccaggccgccaaaatccatactacagcacagtgggtgtactccacggacatcgagggcttttttccctcaacccctatcggcttagtggttgaggctctcatgtccctggggtacaatgctgactctgcagaaatgttggcgaagctctgctgcatcaacggccatcttgctcaagggtccccggcctccccggtaatcagtaacatcgtcctcagacacatagatgcgggtctgcagcggattgccggagactttggttgtcgactgagccgctatgctgatgacatagtgttcagtggcgctcagacccctccagctgatcttggcgacgttgtcccagaactgtttttggacacaccctggcgtcttgctcccgaaaaaacccacatttctactgcccctcgaagactgaaggtgcatgccctcctggtgcacggagccgaagtcaggctgacaaagggatacaggaatcggctgcgggccttccggcaccttataaaaaacggaagagtgagggaggcagacctaaagaggattcagggccacctacattatgccgatcatgtggcggcagaatctgtcgtcaacggcgatggtagcgccattccctga

SEQ ID NO: 14145 - RNA, 1047 nt, synthetic construct
  source 1..1047: mol_type = other RNA
atgtctctgacgcggggcccttccaatcgggaatccagcagtagacacctcacaaaggactcattcgcgaaaatgcgcctgccccatcatcttgtcgagtcgttgctctttcagtatgaaacggtcgacgacttagtgctgagcctgggatcagaggtaacccctgctgaagttctggacattaggagactcgtcgctttgggccttccccctgtcatcagccgagatgtgctggcaaccataatcggcgtgaatcccggtctgatttggagtatggagagacgacctagaaagtattaccgctacttccctatcaaaaagggggtgggtgaacggcacatattcgctccacgggtggccctgaagatcatccagaagtggcttagttatcagtttgctaggacatacctcgccccaccacatgtttttggcttcgttgcgggaaggagccatctgcaggccgcaaatgcacactgtggggctcgctgggtgcatagcgtggatattcgtgatttctttcctagtatcaccgccaatgtgctatcttcaaaattggtcgaactcgggtacaacgacctgtctagcgacttcattaccaaattttgctgccttaacggtcaactggcacagggagccccaacctcaccgactttatccaacctcgtgttcagggccatggacaaccgcctggtcgagatcgcagaaaggttcggggcccggctctctaggtacgctgatgacattgtgttctccggaactcagcaatttccggaagatctgccagcatgtgtagaggagatatttgtaggccaaccatggcagctggctcccgagaagactgagacagccatattaccccatcgcctgaaagtccacggactattggttcacggccacaaaatccgtctaacaaagggttaccgaaaccggattagagcctatgagcacttgcaggccaatgggaggatcattgatgaggacgcgagaagagttggaggccaccttatgtatgcccgccaggtggaatcctttatcgtgcccgattga

SEQ ID NO: 14146 - RNA, 975 nt, synthetic construct
  source 1..975: mol_type = other RNA
atgcggctgccccatcctttagtcgagtcgctgctcttccagtacgaggcagtggacgacttgatccttagcctggggtccgatgtgacaccagatgagactgcagatattcgtcggttagtagctctggggctgccccccgtgatctcaagagacgtgctcgcgaccataattggcgtgaatcccgggttgatttggtcaatggagcgaagaccacacaagtactacaggtactttagcatcaagaaaggtattggtgagcggcgaatcagtgccccacgcgtggctttgaagataattcagaagtggctatcttgtcaattcagcaaagtctacgtcgcaccccagcatgtttttggattcattgcaggtcggtcccatctccaggccgcccatgtccactgctcagcaaactgggtgtactctgtcgacataaggaacttttttcctagcatcaccgcgaacgttctctccggcaccctgatggatctcggatattccgcacctagtgctgacctgatcgttaaactttgttgcctcaacgggcaactcgcccagggtgctccgactagtcctcccctaagcaacctggtatttaggggcatggactccggactgctggagatcgcccagagattcggcgcccgtctgtctcgctatgctgacgacattgttttttctggcacggaacaattcccgcagaatcttccagctacagtggccgagatcttcgccggccaaccatggcatctggcgcctgaaaagacagaaatcgccatccttccaaatcgcctgaaagtgcacggccttctggtacacggagatcagattagattgaccaagggctataggaatagaatccgagcttatgaacacttacaggccaacgggaggattttggaaggagatgcagctcgggtgggagggcacctgatgtatgcccgccaggtgaaaaatttcatagcccctgattga

SEQ ID NO: 14147 - RNA, 963 nt, synthetic construct
  source 1..963: mol_type = other RNA
atgaaactgccccgccactttgtggagtccacgttcttcatgttcgaatcagctgccgagcttgtgactgcgttggggcctagagtgggcctgggagacgtagctgaaatccacagacttgcccagctggggttgcctcctatcattagtcgtgatgcattagccgttatgatcggcgtcaatcctggccttatctggtccttcgagaaaaggccaggcaggtactaccgacactttcagattccgaaaggctctggcgttcgtaacatcgctgctccgaaggttgccctgaaggctatccagaagtggctgtccatccactttgaaaagtgctttatgccccatacccatgtctacggcttcgtgcccgggcgctctcatctccaagctgcaagcgtacactgtggtgcaaaatgggtgttttccgtcgacatacgcaacttcttcccctctacttccgcccacctcgtgaagcgcgcactgaccactctggggtactcggccgagtcaagcgacttcctcaccaaatttctgtgcttggcgggcggactagctcagggatcaccagcaagccccgtgctgagcaatatggcctttatcgaagtggacgccttactggccgcaatggccgcgaactatggagccagactcagcagatatgcggatgatatagtattcagcggtgtgaatgagtttcctcccgacctacctgtccaaattgctcaactcttcgcccggctcccatggaatattgccccagagaagaccgaaacagcaattgccccacagaggatgaaagttcacgggctgctggtgcatggggaccagattcggttgacaaagggataccggaacaggataagagcttatcagcatcttatgacatcaggaaagatccgagatgatgattggaggcggattaagggtcacttaatgtatgcacggcaggtcagttctagttga

SEQ ID NO: 14148 - RNA, 969 nt, synthetic construct
  source 1..969: mol_type = other RNA
atgaggttgcctcagactctgctgaactcaatcttctttaccttcgccctagagcaagagtttgtgtccgcttttggaaccagcctccaggcaattgaacgttctgaaatcgagagacttgcagccctgcagctccccccaatcacttctgaggatgccctggccctgatgattggagtgaatccagggatgatctggagcttggtgaacaggaattacaagtattatgacagcttcgtgatcaaaaagggggccaaagaaagaaggatctcagctccccgcgtctcaatgaagctaatccaaaagtggatctccctccatcttgaaaacgcttacgaccctcctgaccacgtttatggttttgtcgccggccgaagccatttggatgccgctagtaagcactgtgaggctcagtggatccacagtttcgacattaggaatttttttcagaacaccccatcgaatgtagtggagaacagtctgcttgagatcggctacaaagagccatctacggatattatcgtccccttgtgcacactcgcagggttcctggcacaaggagcgccaacctcccctgttctgtccaatatggcgttcaaaaaagtggacgcgcagttagccgaggtagcagccgctgaaggcctgaacttaacacgctatgctgatgacattgttttctcaggcataaaagcaccgaatagcgcactgattgagattataaagcgcatactggctcagacaccttggtctttagccgaggaaaaatcccattttagcgaagctcccaatagacggaaggtgcacggtcttctggtgcacggcaacaagccccggctcactaagggataccggaaccgaataagaggcttcgaacatgccatgcataaggggaagatcaagccggaggatctcattcggattaagggtcacctgaattacgccgcctacgtcgaaaaaaaattcatatga

SEQ ID NO: 14149 - RNA, 972 nt, synthetic construct
  source 1..972: mol_type = other RNA
atgaggctcccgcaacacctctcctcctccccattcttctcatttagcgagaaggacgacttctttaaggctatcaagaccgtggttgacgatgacgagttggagaggattcatttactgatcgcacgcggcttaatacccattactagcaaagaggtgcttgcgaccatgttgggcgttaatcccggcatcatttggtccatggttaaccgacctcaccgctactatcggtccttcagtattcccaaggggaaagaaaaaagggaaatcctggccccaaaagtcagcctcaaagtcattcagaaatggatctccgttcagcttcagaataatgtgacatttctcgaccatgtgtttggcttcatccctgggctcagccacattgacgccgcctcgcagcatacagaggcatcttggatctacagtatagatctcgaaaagtttttcccttctactccacagagttgggtcgaggcctcgcttggaatactggggtacgatataaaatctgcctctctggtgggagatctgtgctgttacggaggtgccttggctcaaggggcaccgagtagcccagtactctcaaacatttccatgtctggggtggacggatcactatctgctctggctgcggaactgggcgtccgtgtcacacgatatgccgatgacattaccttttccagtatttacgagttccccgaggctctacccgcaagactgagcgcgctgttcaaagacacgccttggagcatcagctctaagaagacacacttggctaagtcacctggccgccttaaagtgcacggattaatcgtaaatgatggtcaggtgaagctgaccaagggctatagaaacaagctgcgggcctacaagcacgtgatcgaaaaaaacaagtgcagagataaggatactgctaggctgtcaggtcatctgagatatgcagcccagatcgagcggcataacggtgaatga

SEQ ID NO: 14150 - RNA, 969 nt, synthetic construct
  source 1..969: mol_type = other RNA
atgcgactgccacaccaattaaccgggtctaggtttttctcgtttagcgacgaaggagagttcctgaaatcggtgtctgcggtagtggacgaggaggaattcgtgcgtattggtagtctggtgcaggccggccttatgcccatcacctcaaaggaggtactggcgactatgctaggggtcaaccctggcatcatttggtccctcgagaataaaccagaacgatactatcgccgctttaagatacctaagggtaagggcgaaagagaaatcgtggcccctaaggtgggtttaaaggtgatccagaagtggttttctgtgcagctgcaggattgtgcccgcatcgacgatcatgttttcggttttgttcccggcaggagccatattgatgccgcctctgtgcacacaaacgcaaactgggtctactctatcgacttgaccaacttcttcccaagcacaccgattaattgggtcgctagcagtctgattaatatcggctacgatgctgatagtgcagaccgaatttccaaactgtgctgctatcgtggagctctggctcaaggatcccccgcctcacccgtgctgtcaaatattagcatgagagggatagatgccgctcttggcgcattggcggccgagatggatgtcagggtcaccagatacgcagatgacataaccttcagtgccgctggagagttcccccaggttctcccggaaagactcgagtcccttttttcacagactccttggaaaatcagccaggagaagacttattttagcgaggcaccagtacggttgaaagttcacggactcgttgtgaacggcaatacagtgaaactgacgaaagggtacaggaacaagctgagggcctatcggcacgtgttgcagacaaatcgctgtagacaggaagacctagcacggctctccgggcatgtccggtacgcttcccaagtctcctctcgggacgactga

SEQ ID NO: 14151 - RNA, 978 nt, synthetic construct
  source 1..978: mol_type = other RNA
atgcgcctaccccacaatctcgtggaatcacagtttttcattttcagcgaaagagaggattttttgaaagcagtggattcagtggtcgaccacgaagagcttcagagaatcaataagctcatcgagggagggggaatgcctattacctcaaaggaggtgttggcgactatgtttggcgtgaaccccggcatagtatggtctttcatcaataaaccagaccggcattacagaaagttcagcattcctaaagggaagggaaagaggagtatactggccccgaaagtggggttaaaagttattcagaaatggatctcctaccaactccagggcaaagcacggtttcctgatcatgtgttcggattcgtgcctggaaggagccatatagatgccgccgtaaggcatacatccgctaggtgggtttacagcattgacttggaggacttctttccttctaccccacgatctctgatcgcgagttccctttgtagttttggttatgacttcaagagttcagagctgatttcgaagctgtcttgctatgacggcggtctggcacagggtgctccaagctcccccgttctcagcaacattgccatgtttgaagtcgataccgctctggccgagctggctgaagagcttgggatacgcatcacccgttatgccgatgacatcacgttttcctccgagggcgtgtatccctcctctctgccagaacggcttagcactatcttctatagtacaccctggaagatctctaaaaagaagacatacttctccgtcgccccgaagagaatgaaggtgcacggtttgatcgtcaattgcggcgaggtcaaactgactaaaggctaccggaacaagttacgtgcttatcgccacgtactccagtcggggctatgcaagaaagaagatgcatgtcgcctggaagggcacctgaactactactcacaagttattaagcaccgagacagcagcacatga

SEQ ID NO: 14152 - RNA, 918 nt, synthetic construct
  source 1..918: mol_type = other RNA
atgggtaaaaagctaaaacggggcgaagccgaggagatccaaaggcttgctgccctgggcctgccacccatcacttcccgttggtgcctcggaaccatgctgggggtgaatgcaggcatcttccgctctatggaactgcggccccacaggtattaccgaaacttcagactggccagtggcaataaggtgagaaatataagggcccctaaggccggactcaaggtggttcagaggtggatagctcataacctggcaaatgcctacgtggccccggaccacgtctatggctttgtctctggacgctctcatatagacgccgctatgcagcacgttaacgcgagctgggtggtgagcgtcgacatctccgacttctttccttcaacacctgtcagtgttgtgcggtccaggttgctgtctattgggtaccaggaagtggccgccaacctgattacctctcttgttacatacgaggagagcctacctcaaggtgctcccacttcaccagtattgtccaacatttgctttggcccatcggatcttaaaatggcagcaatcgctgagcactacgatgcaagaattactcggtatgccgatgacatagtcttcagtggtgaaaccggcatcccgcatgctgacatcctcgtaagcgttagggatcattttgaacggacatgttgggatattaatgagcgaaaggtacgaatttcacaggcgcccaatagacgtaaggtgcacgggctcttagtgcacggtggaagcgtccgcctcacgaaaggatacagaaatagaatccgcgcgtataaacacctgctgaacacccgcagtgatattccacaggaggactaccattcaatcatggggcacgtgagctatgcagatcatttagctgagttggtggggaagtccgactccaactga

SEQ ID NO: 14153 - RNA, 969 nt, synthetic construct
  source 1..969: mol_type = other RNA
atgcgcctgccacacaatctcctcgaaaatgtagggttgttgacagacggcccaaaggagcttatcgcgagcctgggtgagggatgcggtgtggaagaggcggatgagattgtgcgcctgttctcactgggactgcctccggttacgtctctgaaagctctggcagtcatgaccggctacaacccaggattcatctggtccttagtcgaccgacccgaaaaatattatcgagttttcgacatccccaagggccgacagctgagaagaattgaggcaccccgagtggctctgaagctcatacaaaagtggttttctctacactttgagcgtcagtggaaacctcatgatgctgtgcatggctttgtgagggggagatcccacctcagcgccgcaaggaagcacgtgaccgccgaatgggtggtcagtgtagacattgagaattttttcccctccactctcaaaaccgatgtccgggccgccctggttcgtcttggctatcgctcagaagagtcgcttgcaaccatagaacggctctgttgccgctatgagcgcctaacacaaggcgcaccatcatcccctgtggtcgccaacattgctcttgacttgctagaccagaaaatagctgccatcgcagatcaccatggagtgatcttcacacgttacgcggatgacattgttttgtctgggcgggacagggctcctgcaaacatcctggaagaactgactgccatcttcgaggggactagctggcgccttagcgcccagaagcagagcgtgtctcacctcccggacaggttaaaggtacatggactcctggtccatggcgagcacgtgaggctgacaaaagggtacaggaacagattaagggcctttcggcacctgagtgatcggggcgccattcgggaagctgatcaaagacggattagaggacatttgaattacagtcagcagatcgagagaggtgggtga

SEQ ID NO: 14154 - RNA, 966 nt, synthetic construct
  source 1..966: mol_type = other RNA
atgggactcccccatcacgccgtgtactcccagatgctgtgcgctggttctgagcaggatctcctgttaggcatgggcgctttctgctccagtgcggaggcggaagaaattagtcgcctgactgctttgggactcccgccggtcacttctctagaagcacttgccgtcatgacggggtttaaccccggtttcttgtggtctttacagaacaggccagaccggcagtatagggttttctcaattcctaaggggaagacatttcgtcagatcgaggccccaagggtgggcttgaaatttattcagaaatggctcagtatccacttcgagcataagtggagcgcacaccctgcagttcacgggttcgtgaagggccggtcacatattaccgccgctcgagtacacctgaacgctcagtgggtgatcagcgtggacctggagaattttttcccatccacaaaagtggatactgtggagaaggcactcagaaagctcggctacaaaaccgacgccagcatctctatcttgagtagcctgctgtgttttaagttaaggctgtctcaaggggcgcctacatcccccgtgatctcaaatatcgctctgtccgatatagacgataagatcagccttatagcacagaattgtggagctaggtataccagatacgccgatgatattgtactgagcgggacactgtccccacccgagaacctgctgctagccattaagaacgtctttgaaaagacctgctggagacttgccgaacgtaaaacgtcaactgttcagctccctcaacgcttgaaggtgcatggccttctggtccacggtgaaaaaatcagacttaccaaaggatatcggaataagatccgggcattcaaccatctgttcgagaaagacgccgtgaaagccgaggacgcccaacgaattcgcggacacgttaattactcgcgccaaatagaaagagtctga

SEQ ID NO: 14155 - RNA, 969 nt, synthetic construct
  source 1..969: mol_type = other RNA
atgagacttagccacaagtacattgaaaaaatcgctctggtggccggatcagccgaggacctcatcacagccttgggaaactcgtgctctcccgaagaaaaggctgagattcaacgcttagtggacgccggccttcctccagtaacttcctctgacgccctctcagtgatgaccgggttcaatccaggctttatttggagccttgtgtcccgacctgagaagcagtatcgggtgtttaagattccaaagggcagagaagaacggcagattgaagctccccgggtcgcgctcaagctgatacagaaatggttttcagtccacttcgagaacaagtgggttgcacattccagcgtgcatggctttgtgcggggtcgcagccacatctctgcagcaaagtcccacctgggagccgagtgggtggctagtgtagatataaggaacttcttcccgagtaccaccgcgtccgaagttgataatgcgctccgcgatctcgggtatggcgacgagagtatcaagctattgaaacgcctgtgttgcttcgggggcagattatcccaaggggcccctacatcacctatcctgagtaacatcgcactccataggatcgacttggatgcctctaatgtggccattgagctgggagccgtatatacacgatatgcagacgacatcgtcttcagcggaaaaggtctgccccccccagatgtgctggagaaactggagaagctctttaccggaacgtgttggcagttatctgaaaggaagcgccacattgctcagttgccggggcgtctgaaagttcatggccttctggtccatggcgacaaagtcagactgactaaaggttaccgaaatcgggttagggcatacaaacacctagtgagcaaggggaggatcaacctggatgacagaaaccgtatcggcggtcacataaattacgctaagcagatagatgaggcttctgattga

SEQ ID NO: 14156 - RNA, 978 nt, synthetic construct
  source 1..978: mol_type = other RNA
atgagactcccccataatttaatcgaacgactgaccctggtagcgggcagtccagacgaactatgctccgcgctaggtgatgccgcaggtggagaagaagtcgccgagataggaagactgagtgccgcagggctgccacctatcacctctctcaacgcactttcagtgatgactggctataatccaggctttgtgtgggctttggctaacaggaccgctcgctactatagagtttttgagataccgaaaggccgaggcactcgtcaaatcgaggccccgcgagtcgctcttaaactgatacagaaatggctgtgtcaccatttcagcgccaaatggcagcccctggatgctgttcacggtttcgtcccaggaaggtcgcaccttacggccgcaagcgtgcacttacgcgcggaatggatcctcagtatcgacctggaaaatttctttccctccacacctattgaccagatcaggggatcacttagaaaactggggtatcaggatggggacgggctggagttgattgcaaacctcctctcttttaggggacgcctgtcacagggagcccccacaagcccagtgattagcaatattgcattgagcgacatcgatgggatcttgtccgacattgcccggaatttcagaattagattcactcggtacgccgacgacattaccttctctggcattagtggtgtacaactgcctgacgagctgctcgcatctgtccgggagcagtttgtggggacaccttggcgcatctccgagaggaagattcatatcgccaagtcccccgctcggcttaaggttcacggactgctggtgcatggcgatgagctacggttgacaaagggctatagaaaccgcctcagggcctaccggcatctgatgcagctcggcaggatagatgcttcagatttaggcaaggtgaccgggcacatgaactacgctagccaaatcgagcgtctgaagtcttga

SEQ ID NO: 14157 - RNA, 972 nt, synthetic construct
  source 1..972: mol_type = other RNA
atgaggctgcctcatcacaacctagaaagtgtctgtttcctgttcgagcacttttcggagcttataaaagccatgggcgataaatgccccccggaggaagcaatcgagatcgagcggctgttcaatctgggactccccccggtgacctccgagaatgcacttgccaccatgctgggctataacccaggctttatttggtctttattaaacaggacgagccggtactaccgtcagttcgatatccccaaaggtgccggcactcgcaagatcgatgccccaaagatcgccctgaaggcgatccaaaaatggctctcatatcacttccagaagaagtggatccccaatgaacatatttttggctttctgcctggaaagtcccacatggacgcagcgagcaaacacctcagcagtaaatgggtgtatagcatagatatccagaattacttcccttctatcagtacagtgcgcgttagagacgcattggagaacctggggtattctaccgagccatcattgaaaattattcccactctctgttgcctgcggggatcattagtacaggggtcaccagcttcccctgtcttgagcaacattgtgctcaaaaacctggatgaagaattggccaatttcgctcgagaaaaaaactggaagtttacaagatacgctgacgacattgtattttccggcattgacgacatcaacgagagcgattttatacctatcaagcttttcgtcaaccaggacgggtggatgatctctgataagaagacttacctcgcacgtcatccaaataggctgaaggttcacggtcttctggtgcatggtgacaccatacgactgacaaaagggtatagaaacagaataagggcttttcgccacctcttgaatgctgacaagattaaggaacaagacctagccgttattcggggacatcttaattactccgcccaggtggatgatttccagctgtga

SEQ ID NO: 14158 - RNA, 960 nt, synthetic construct
  source 1..960: mol_type = other RNA
atgcgattgccacagccccaattagaatcgataggcttcctgtttgaggccccatccgagctgattcaggccatgggtaacgaatgttcccctgacgaggcagacgaaatccgacggctatacggcctggggttaccccctgtgaccagccaggagtccttaagcgtaattttcggctataacccagggttcatttggagccttcttaataggactccgagacactatagacattttgaaatccctaagggcgccggacatcgtcagatcgaggctcccagggtcgcccttaaggccatccaaaaatggctgtctcaccacctccagagggcgtggactccgaacgagaatgtttttggatttgtgcctggacggtcccacatcgatgcagcagcgaagcatctgtcaagcgaatgggtgttctctgtcgaccttgaaaattttttccctagcgtgtctatccgtcgcgtgaaggaggcactcagaacagtcgggtaccaaacggataaatcagtggagatcttgagtactctctgctgcctggataaccatctggtgcagggatcacccaccagtccagtgttgagcaatatagtactaaagaacgttgatcagcagttcgcctctattgctgctgagaaaaagattgtttttacacgctatgctgacgacatagtgttctctggcagtggtgatatcccacaccagaccctgacacagatcaagtcggtcgtctccgacgatggatggaccctctccgaacggaaagaacggctcagcgagacacccaatcgcttgaaagtacatggcctcctcgtgcacgggcgcaaactgaggctgaccaagggttataggaatagaattagagcttaccggcacctgctgaagaacgagaaaataaaggaggaggacctgagtaagattaaagggcacctgaactacgcctcacaagttgaatga

SEQ ID NO: 14159 - RNA, 972 nt, synthetic construct
  source 1..972: mol_type = other RNA
atgcggttcccccatcctgacttttccgaactgtgcctcttcgcacaaaccccagatatcctgattaaagccctgggggatttcagtgacgacgaggaaaggcagctcatcttagagtattgtgctcaagacctccctcccgtgacatcagtgatcagccttgcagtaatgaccggctttaatccaggcttcatttggagtatagtttctagaccacacaagcattacagatcattcccaattctcaaaggaaaaaacgcccctccccgcataattaatgcacccaaggtggggctgaaagctatccagagctggctttctatccactgggtgcgcaaatttgaccaccaccctaactcatttgggttcatccctggacggagccacgctcatgcagctaggtgtcatgtaggcgccgagtgggtgttcagcgtggatattaaggatttcttcccgtccattcaggaggaccgtgtcttgaaggccctgcagtgcctggggtacaaggctggtgacggcactaccctgctgacccgcatgctgtgcctggatggtgccctctcccagggatccccagcatctcccgttatctctaacatgatactccgaggtctggatgagcggctgttggcccttagcctcgaactgggcatcgtctttactaggtatgctgacgatattgtctttagtggtaagggccagccgcccaaagcgctactagagaaggttgtgaatgaagttaacggggacggatggacgatcgccgaagacaagctgtacacatcgattcttcctgcgcggttaaaagtgcacggccttctcgtccacggggcgagtgtacgtctgacaaagggatataggaatcgaataagagcctacagacacttgttggccgagggcaaaatcagcaaggatgatttatcatctgtgctgggacatgtctcctatgccgactttgtggagaagttgtga

SEQ ID NO: 14160 - RNA, 1014 nt, synthetic construct
  source 1..1014: mol_type = other RNA
atgcgactgccacacccaaggacggagcagctcggatttctcgctgaaacccccaaggaggtgtgcaaactcattggcgccagctgtggggaagacgagcagaagttgatccagcaatactacgaactaggcctgccgccggtcacctctgtcaatgctatctccgtgatgtttggatacaacccctcttttacatggtcgcttctgaaaaattcacacaagttctacagggtgtttgagattccaaaaggacctaagaaaaggaatattagtgcccctaaagtttccctgaaggtaatccagaagtggctggcgacacatttctacaataaatgggaacgacctgactatgtttttgggttcgtgcgcggtaagtcccatattggcgccgcccaggagcatatcggtgctaattgggtgataagtgtggacatagaggattttttcccaagcattcggtggactagagtgtatgatgccattaccgatctgggatatcaggacgacttcagcaagcaggccttaactcttctttcatgctattacgggagccttgcacaaggagcgcctacttcccccatactgtcgaacataataatgggccccctggacaagaagattttcgaactcgcacgccacaacagcgctacttatacccgctacgctgatgacatcgtgatctctggtaaggacggcgagcctaacagtctcctggaacaggtctgtacgctgatcgagtctgatggctggaaaatcagcgttcagaagaaaaagatccaaaagtcccccaatcggttgaagatccacggcctattagtgaatgataaaaacgtccggttgacaaaggggtaccgtaaccagattagagcctacaaacatatcttgaacaacaactccatcgatgacgaatcaaaaaataaactcagagggcacattgcatatgccgatcacgtagcaacctattctgagcaactgcctccacccagtacaccatcaagcaagctgcccgtctga

SEQ ID NO: 14161 - RNA, 981 nt, synthetic construct
  source 1..981: mol_type = other RNA
atgcggttcccccaccccgacctggagaaaatatgctttattgcagaagacccggataccctaattaaacttctgggcgaacactgcacagcagatgaggccgcactaattcagcagtgttgtgctagtaggctccctccgatctcctccccagacgccatcgctactatgttcggctataaccccggctttgtatggtttatgcttaccaagaccaaccgcctgtaccgcacattctttataccaaaaggcaaaggtgagcggcagatcaccgctccccgagtgtctttaaagcttatccagagatggttgaatttccattggtctgcggcttgggtggctcctgattgcgtccatggttttgtttcaggaaggagccatgttactgcagccactgagcactgcaatgcgaagtggattgtgagcgccgatatcgaggactttttcccttcagtgaaaaccgcccgtgttagacaagcactcgctgaactgggttacgctaacatggattcattggccctcctcggaaaactggtgtgtctcaacggagctctcacgcaaggcgcccctacaagtccattactgagcaatatcgtgctgggccagctggaccggaacctgaccacattagctgaagaactcaacctggtattcactcgctatgccgacgatatcgtgttctccggaaagggggagatgcctgaggggattgacaagaagataaaggccatcattgagcaggacggatggacggtcgccgaaaagaagttcgaggtcgccaaggccccctctaggttgaaagtgcatgggcttcttgtccatgggggtaaggtgcgtctgacaaaggggtatcgaaatagattgagagcatttaggcacgttctgagcaatgggaaagcctccgaaaaagatgtgccaaaactgtcgggccacgtcgcatacgcggacttcattgacctgcagcaccggaagccagattga

SEQ ID NO: 14162 - RNA, 990 nt, synthetic construct
  source 1..990: mol_type = other RNA
atgaagccaccacatccatcttcgttttccgtgggcttcctaaccgagagcagcgacgaactcattaggatcataggtaatagggtcacggaggaggaatctcagctgatacggcaatactttgatctgaagctgcctcctatcacttctgtcccagccctcagtggtatgttcggacttaacgaggggttcatctggagcgtgatcaaccgggcgacaaagcattatcgacgctttgaaattcctaaaggcaggaccacccgaactatctttgcgccgaaggtgggcctgaagatgattcagaagtggctcagtattcatttccaagaatgttggtccagcccccgctccgtgttcgggtttgttcctggaagatcacaccttgccgccgctgcacagcatctggggtcagaatgggtgatgagcatcgatattaagaacttctttcccagtacttccacacagaaggtggaagcagcattggggagacttggctataatgacgagttcagccgcatggccatcaccaaactaacatgcctgcggggtggactcgcacaaggagcacccagtagccccatcttgagcaatatagtactgcacgatctggaccagcggttatctcagtacaccgaggccaacgacctcgtctatacaagatatgccgacgatatcgtgatttccggcaacgactcaccacccaatgatattattgatgatgttcgctcaatggttaaagatgatggatgggagatcgctgagtctaaaacgtccttggataggattcctaatagactgaaggtccacggcctgctggtacacgggaaacagatcaggttgaccaagggctaccgtaataaaatcagagcctaccagcatttacttgctaacaacaaaataactgacgaggacttttcaaagatttccggtcacatccgttacgctagttctgtggaaaaattcgacacacacccggacaattacgactga

SEQ ID NO: 14163 - RNA, 1479 nt, synthetic construct
  source 1..1479: mol_type = other RNA
atgaagatcaattttaatgaggacatcctgctgtgggcaattggggtgcttcagcccgctagcgctagcgatgcgctgaaattcatatcctacatctatccagaaatcaaaccactcccactggtcaaggaaatagatcaggttctcagccggtaccgggacctcggtatcgtggtacgcgtgcacggcaagtctaggctgtactcactgacatacgccggaaatgctaagctgtcactgaaattgcggcgccatagggataaagcccgtctctttcttctcaaagacacaaggaagtgtaatatggtgctgtccggggaagaaaagaaagagtcagttggagccagcccaacgtctgacgggtcctctactttgcaggatttcgcccgccctatcaagagtgctgcagccccgcgatatcctagacacaacggtcggttttattggtcaagaatctctaagcaattgaatttccaggtgggattgaacttttcgtcacccgacattttcttgaagtactatagcttccctagcttaaaagcgatccacaacattagtccggaccctgctgagggaaacgacctctccgtgactgattttgctttatcagtgggtgtgtcgccccggctgatcacaagtctgctccacgcaacccataaatattacaggcagttcaacatcggcaagcgaggcgggggcaagaggactatttctgccccacgcacctttcttaaggtgatacagtactggattctcgattaccttctttacacccttaagagtcatcccatttgccactcttatcagcgtggtaaatccattatcaccaatgcctctcctcatatcaatagcgaatatgtggctaacattgacattagcgacttcttcggctccattaatcaaaccatgatcattgatctcctgcgcaaaaacgggttcggcgagcagctatccaaaacaatagcaagacttacctccctgaataatgggttacctcagggagcgcccacctcgccaatactgagtaatgcctatctgtacagctttgatgaaacggcagcacagattgcccagaacacagggctgcacatcactagatacgcagatgatatcgcaatctcaggcaaaaagaaggactccattatcaacgttataactctgttcaagcaggaactgtctgccaaaggtctggagctaaacgctaagaaaacccgggtagccagtcgcggcggacaacaacgtgtagccggagtcgtcgtcaacgacaaggctctacccccgagaaaactaagaagaagggtcagggccatgttccatcaagccgacaattatcccgaggagcacgttgagaaatacaatacactgcgagggtatctgagttattttaacagctttccagcgctcaagggaggccccgagttagagagctacaaggaaatcttgaagtccttgtctaacaacgtgcagcctggcgcttga

SEQ ID NO: 14164 - RNA, 1482 nt, synthetic construct
  source 1..1482: mol_type = other RNA
atgcgggttacactgaacgaaaatatactgctgtgggctgcagcagtgctgcagcctgcatctgctgccgatgtccgctcgtttattgctagcatctacccggagatcagtctgcttcctaatattggcgagattgaaaacatcttctctacctggagggaggaaggttatctccagagggttcatggcaaatcccgcctgtattctgctacctacaagaccaatctaaagctgtctgtgaaattgcgacgttcaagggacaagagcaggctgtttctattaaaatcaactcgcgcagccaacgtgaacgttagcggcgtacgggagcaagactccgtgggagattcaccaagtacagaggggtccattatactccaggagggagcctggccaatcaaaccagctgctgcccctagagttccaaggaccacagggcgtttttactggcccagaatttctaagcagcttagtatagaagtcggccctagtttttcgtctccggataccttcttcaattactacagctttcccagcataaaaaccatccacgaggcctcacataaacccgcctctgagaaggacttgtccatcacagacatctctctggcgattgggatctctcccagactgatcacctcctttatccacgctcctgaaaatcactatagacagttcaagatcggaaaaaggggcggaggtgaacgggtgataaatagtcctaggacttttttgaaggtagttcagtattggatcctcgactacctcctgcatagccttccatgtcaccccaactgccactcctatcaaaagggcaagtccattctgagtaactctctgccgcacgtgggtcagaaataccttgccaacattgatatttcgaattactttcccagcataaatgagaaaatggtgttcagcttactacgcgacaacaatttcggtgagcaactgagtaaagcagtcgctcggattgtcactttggaaaatggcctcccacagggagcccctacttcacctatcattagcaatgcctttctttgcaatttcgacgagataatgacccagcgagcactcagctttaacttggtgtatacacggtacgccgatgatatgacgatcagcggagagaataaggagaacattatctcactgatcaagaacctctcagccaatctcaaagacatggggctgtcaattaacgaaaaaaagactcgcatcgcgtcccaaggagggcagcagaaggtcacagggattgtggtgaatgaagtctcccagcccccccgaacgtatagaagaaacatccgcagtatgttccatcacgcagaaagaaaccccgagttattcgcggataacattaaggtgctgaaaggctacatcagctaccttcagtccttcccaaacatgcagggcaaaaaggagattttccggtataagaacgtatgtaagactatcgaaaagaatttcgtgcaacagtcccattga

SEQ ID NO: 14165 - RNA, 1452 nt, synthetic construct
  source 1..1452: mol_type = other RNA
atgtctgcccggttcaactggcgaatcatactgtgggcgctgggagttgtgcaaccagcgactgccaaagagatacgtgagctgctgttgaaagtgtttcccgacgccggacgcatcccttctcaggatgaatttaaggtctacctcaacctctgggagaaagagcgactggttggtgtcgtgaataggaaatccgcacattattcactgacttctcgcggaaattatcgcatggggtccgacttaagatacaacagggacaaagttcggttatttctgatgaaggaagccagacggaacagaatttaccttagcggagaacagataaaggaactcgtgggggactcccctacagtaatcggcagcagggagatctacaagaggcaccggccgataattgctgcactaccctgctttggaagaaattattggccaatgctgttaggtcagctgctcgctgatcctcttaaaaacggcagccctgataaccatctcgccctgtattctttcccatcgttcgaatcccttatttcaagctacgacagattcagcagaattaaaaagccctcccttcatctgctggctctggcgataggcatcagcccccggttgattagttacatcatctataaacgccccgagcactacagacagtttgaaattgggaaaaggggcggcggaacaaggaatatctgcagtccacgagtctttctcaaaacgattcagtattggatcttggattacctgttgttcgcacttaaaatccacccctcttgcaatagttatcaaaaggggaaatccattatcaccaatgcatcagaccacgtaggaaagaactatgtggccaatatcgatataaaggacttcttcaacagcatttccgagcgtagtatttcaaagttcctgtgtaatcaggggtacgatgccggtttctctgagctgattagtaaactggtgaccctgaacgatgggctcccccaaggcgcaccaacttcccctcacatcagtaacgccttcatgtaccagtttgacgaaaagatctttaagttctgcgagaagttgaagatggtctactcccgctatgctgatgacatgaccatttcaggcagtaacaagaaagacatcataagggggatcgggttcgctaagcagtacttagactctatgggtctttcgctgaatgagtctaaaaccagaattgccagcaaaggcggccagcagaaagtcaccggaatcgtggtgaatagccacatcagcccaccgcgcatgttccgacgtaagattcgggctatgtttcataatgcctataagaaccctaaggagtacagggataagcagggccaactcaagggttacctctgttatctatgtgcatttccgggcgtgttgactgccaaggataaggagatttacgttcggacaatcaaccgcctatcatcctttgctgaatga

SEQ ID NO: 14166 - RNA, 1329 nt, synthetic construct
  source 1..1329: mol_type = other RNA
atggaacccatcatctctcgttggctcgaagagagatgcatcgtaagagtgcacggtaaaagccgcctgtatagtatcagtcacgtgggtaatgacaagctgtccattcggctccgacgccaccgagataaggcaagaatctttctgcttaagtctgcacacgatgcttcatttcaggtgagcggggaagcccatcaggagcttgcaggggacagcccggctgttaacagctctgggaatacgcaggagggcacctggcccatctctagtgccagcgatcctcgggtgccaagagtcccggttcgaacttattggcctagggtcgtgcggcagctggactttaaggtgggatctgtccccaggtccccagatacacacctcacctattacagcttcccttcggttcagtccatccacgacgcctcagaacggtgtgcaccgccaaatgacctgagcatctcagacctgggcattgctttaggggtcagtcctcggcttctgactagtttcattcataaaccaagtcgccattatcgacaatttgaaattggaaaaaggggtgggggaaaccgtgttatttcttcacctaagttgtttctgaaggtaatccagtactggctgcatgactactttttgtaccgactccagattcacgattcctgccactcctaccagaagggtaagtccattctctctaatgctgagcctcacgtgggcaaacatttcgtggctaacattgatattgaaaactttttcgggtccataacaaaggacatggtatcccagttgctgaggaataatcgttttggcgagcatctgagcaattcagtggccaggctagtgaccttcaatgacgcgttaccacaaggcgcccccacctctcccacaataagtaacgccttcttatatgatttcgatgagactatggcagcctggagcataattgagggcctcacatacacgcggtacgcggacgatatgactatatcgggaaatgatagagagcagatactcgacgctatcaggctggccgagcgcctgttgaacgaaatcggactgaggcttaacagcaagaaaaccagaattgccagcaagggcggacagcagaaggtgaccggcgtcgtggttaacgagaaaccacaaccaccccgggatcttcggcgcagaatcagggctatgttccatcaagcgaaaatgtcacccgacgaattcagacaaaaactccccatgctgcgcggctatctatcctacctaagctcatatcctgccctgcgcaactctgaggagctgaactcctacatcaacgtcttgaagaaaatctcccagtga

SEQ ID NO: 14167 - RNA, 1509 nt, synthetic construct
  source 1..1509: mol_type = other RNA
atgtccatccagttcaacgatcagctacttctatggggactgggagttctgcaacctgccgcccctcaggaagtattgagctttctcaaactggtctatcccacagtcgaacagtggccagacgaactgtatcttaacgaccgttttttccactgggaagagcttggctacatagtggtgctgaacaagaaatattcgatgtacagtcttacggccctggctaatatgaggatggacgtgaaactgagacggcagcgtgataaagcgagaatctccctcctgcgcgcggcatatgatgccaatgtgagtaggccgggcgtgatggaccaggacttggatggggcttcccccagttccgagatctccagcacactacaagaggggtcccgacccgtgggaagcggatctaagcctagtagaacagagccaacccggctccgcaccagaacgtattggtcccgggtcagtgagcagctctctgtgcaagtggggctggacttccactcccccggtatcccatcgtttcagtaccgatactgttcttttcccacactcaaggctgttcatcaggcaagcttgggagagagctcagaaaatgatatgagcataagcgagctgggccttgctatcggcgtgtctcccaggttactgacaagttttctccataagcctgagaatcattatcgacacttctctttgcctaaaaagggtggcggggaacgagatatcgcagccccacgcttcttcctgaagactattcagtactggattaagtcttacgtcctttgccatctgaaggttcataacacctgtcacgcatacacctcaggtaaaagcattaatacaaatgccaagccgcacgtggggaaggcttacgtagccaacgtagacatcgagaattttttcggcaatattactaaggaacacgtctttagaatcctggaaaaaaacggcgtgggccgcaaactcgcgactgcagtctcagggatagtgaccctgaatagggtcgtgccacaaggggcccctacttcccccgttatcagtaacgccgtgctgtacgaatttgataaagctatgagcaagatctccgttgataagggactcgactatagcaggtatgcagatgacataaccttctcaggcgagtcgcgctctgacattgaatacatcgtgtctaaatgccgagagttgctgtctgccgaaggattcaacctgaaggacaaaaaatcacgggttgcctcaaaatacgcgtctcagcgcgttaccggtttagtggtcaacgagaaagtgcagcctccgcgggagtaccggagaaagttacgcgccattttcaacaatgctttaattaacccacaggagtacgtcgatcgtctcgacgagctgtatggttactttggctatctcagcagcttcgatggagccaggaacgcaaggcaaattaggaaggacagaattgctatctatcgggtatccagattggctcggataaagaagtcaaaggatgagtga

SEQ ID NO: 14168 - RNA, 909 nt, synthetic construct
  source 1..909: mol_type = other RNA
atgtccctcagtcagttggccctcgctatcggaatttccccacggttgctgaccagctttacccacaggccggagaatcattacagattcttcgacatctcaaagaagggcggcgggaaacggcagatagctagtcctaggttctttcttaagaccgtgcaatactggatcaagagctatatactatgccatctgaaaattcacgactcatgtcacgcatacttggtgaataaatccatcattacgaacgctgaaaagcatgcaaggaaggagtttgttgccaacatcgatatagaagacttctttggctcaatcaaaactgatcatgtcttccagttactgaagaagaacgggattggtgaaaagctgagcaaggcggtggcacacctcgtgaccctggatggaaagctgcctcaaggagcccctacaagccccacaatttccaatgcttttctgtatgagtttgacaattctctctctaagatctcgaatgaggctgggctggaatacagcagatacgccgacgatataacaatttcaggaagtagtcgctctgcaatcgagagcgtcattttcggctgccgcaatcacctctggtctaacggtctgaaattgaacgagaacaagactcgtatcgccacatcacatagttctcagagggtcactggccttgtggttaacgaaaaaatccagccacccagagagttccagcggcgcattcgcgccatctttcacatcgtaaataaaaaccccgagagctacatcgagcggatatccgaactaagggggtattataattacctgctgtccttcgatgcaattaaaaactctagacacttacagcgatatcgaatggtgatcaacaaacttaaagccgcggcccgtaataacagctcctcgcttatttga

SEQ ID NO: 14169 - RNA, 1500 nt, synthetic construct
  source 1..1500: mol_type = other RNA
atgagcgtcaaattcaacaacaggttactgctgtggggtttgggcgccgtgcaacctgccactccctctgaggtgattggatttctcaaattggtgtatccagatgttaccgcatggccagataggaacttcctcaggataatctttaatgagtggcttgatcgcaactatgtgattgagctgaataaaaagtacgagatcttcagcttgaccagtgccggcaaccatgctttaggatataagctgagagtgcaccgtgataaagcaagggtgacgcttcttagagctgtatatgacgccaatctcgccagcctgggcgatgtggcccaggattcagacggcgactccccctcatcggaggctagctcagcgttgcaagaagggagtcgcccagtcaattctgggtccgagccatcaagaaccgagagtacccgactcagagcacgcatctattggcctcgcgtatctgaacagctgctgtccgtgggcttagatagacatacttcgaatattccgagctatcgatacaggtattgtagctttcctacactgcgggcaatcaagcaggcctccaatgacaattccgatacacaggatctgacaatcagccagctgggtctgtgcattggggtgagtcccaggctcctcacaagtttcgtacataaaccggagaaccactaccgaactttccgtattgggaagaaggggggtggtagtcgggagatcagctctcctcggttctttcttaagtctatccagtactggataaagagctacatactttcccagtttaacgcacacaacgcgtgccactcttatcggatcggaaaaagcatcattacaaacgcgaacgagcacgcccgaaaatcatacgtggggaacgtggatatcgaggacttctttggctccgtggacaagaagatggtcttcgaatgcttacgcaagcacgggtacggctccgaactatctcgctccattgccggcctggtcacgtttaacaattcacttccccaaggagctcccaccagccccgaaataagtaatgcaattctctttgacttcgacgaacgcctgttcgccgctgcttcggacgttggagttacctacacaaggtacgccgacgacatcactctgagtgggggttctaagcaggttgtggctcagctgattagagagtgtgaggagggcctaaaagcacatggaatgagattgaatagcaagaagactaggattgcctcaattcggagctcccaagtcgtgaccggcctggttgttaatgaaaaagtccagccatctcgagcgtatcgtaagcggatacgggccatcttccatcaggctggaatcaacccttcacagtacgtgggcaggctgaaacaattgcagggctattacagctacctctccgcttttgattctctaaaggactccaagcagctgcgggaatacagagaagtaatcagaaaactcggaatctcttcaaaagaaaaggtcgacgggtga

SEQ ID NO: 14170 - RNA, 1455 nt, synthetic construct
  source 1..1455: mol_type = other RNA
atgaagaagaacgaactgcagatccttctctggagcattggcatcctgcagccagcaagtccgacactagtcagacattttctacaggaaatgctccccaaggcttttaacaatactacgacccagaaaatcaaagagaagttcagttggctccagaaaaatgggttccttgcctatgcactggacggcgtggactacatctactctctcacacgagaaggtgagttagccttggggccaggtatcaggaaaagccgcgataagatccgtttgtttctcctgagggacagtgccagctatattcaggattcaccatcgtcacccgaaaggggcttggagcttaccggcgatagccccgtggtcgaaaccagatatgtgctgcaaggccggaggcctattgctccagctgctggacctggtgtgagaagatactggccttccactttcaagcagctgaaaggatttgcgggaccgaagccccggagcgaattttatccatttgacctctactccttcgcaagtatcgatgagttgaacgcagccgtaggaactgaatgcgaccgtaattctttatccctcattcacctagctctgtccatcggcgtgtcatcgaaacttctgttcgccataagcaataactccaggcgatactatcgctccttcgagataagaaaggcttctggaggtatgagaactatccacgccccacgaatttttctgaagacgatacagcggtggatagttgactacttcctttttcaacttccctgtcaccctgggtgccattcttttcagcgtggtaaaagtattatcagcaatgcagccatacatgtcgggaagaaatacgtggggaacatagacattgccgattatttcaaaagtatcaagtctgagcacttggttcacaaactgtccaaattcttcgggattggcctgtctcgcgctattagcctcatctgcacacatgatgatttcctgcctcaaggcgctcctagctctcccattctgagtaacttctacctgttcgactttgacaaggagatctcactcctgtgtgagcaaaacgaactttcctactcacggtacgcagatgacatcacaatctcgggcaaggaaaagaacagcatttacaacgccattaattacagcaagtacctgttgaagaagcacaacctgaccctgaattatcagaagacccgcgtgtcttcacggggcggacagcaaaacgtgaccggggttgtcgtcaatcagaaaatcaatcccccgagatctttacgccggaatattagggcgttatttcacaacgcccagaaaaaccctatgcagtatacagacaagatcgagatgatgcgcggatatctctcatatctgaatatgtatgagtcccagaagaacatcatcaataaatccaggtacgagcatattattgatgcaatagccgcggtaaaagagtga

SEQ ID NO: 14171 - RNA, 1443 nt, synthetic construct
  source 1..1443: mol_type = other RNA
atgtcaaacaaggtccacccgtactattacctgtgggcccttggaatcatacagcccgcaacacccacgcaggtccaacacgttctggagaagacatttgttgaaagtggggtgaagttcaatctgaacgagatagtgcagtgttttgagaattgcctgaaaggaaagattgtcttaaaagcctccgagtggaatgactccctgtttagtctggggcccaatgcctatatgttgctccctaataggctccgctttaacaaggatagaacaagactctttctgcttaaaaaggccaggatagcttcaagacgtgcctctggccacctggatttggacgcggacggggcttcaccatcagacaagcgcagtttcaagatacaggtgcctcgtcccatcaaacctctcggtctggcacccgcccagttctactggtccggtgcgtatcggcaattgaccagcaccgctggaccgaattcgacattaccagaagtgaggctcccttttttgagcttcgagtcaatcaacctcattaagtccatcaatgaatctacaaagacaactcctttctccattaccggattggccctgtgcattgggatcagcccaagccttctagtgagcaccatacgcaacattgaaaaacagtaccagacattcgaaatcgagaagcactcagggggcactaggacgattaccgctccaagagtttttctaaaaacgatccaacactggttggccgattaccttttcagcaccttacccgtgcatgacgtatgtcatgcttatcggtccaagcgatctattatttcgaacgccgagaagcatacaaatcagaagttcgtcgccaagatcgatatcagcaacttttttggcaccatcacatccgagatgcttattaagaaactgagcccattctgtagtgttgaggaggctaccgttttttctcgaattgtgacgctgaacggttccataccccagggtgcacctaccagcccttgcctgtcaaacttcatcctgttcgacgcagatgggatcatcgctaaagagtgccaaaaagtcggagtgaattacactaggtattctgatgacctgaccttcagtggagaaaaccggggccagctattagaaatcatctctttcaccgagaacgtgctgaaagagtacggctttgaacttaacccgagcaagactcatattatgacttctggcatgctgcaaaacgtcactggcgtcactgtgaatgagaaagtacagccccctagaaaggtgcggaagaaaattcgcgcaatgtttcaccaggcggagcagtccccagagaacttcaaagatcagctggaaaatctcgccggctatgtaagttacctgaatgcatacccagaactcaaagactctcagactctccggcattataaggaagtgctggtgaaattgtccaccctctga

SEQ ID NO: 14172 - RNA, 1380 nt, synthetic construct
  source 1..1380: mol_type = other RNA
atgaagaccgagcttagcacacaaatttatgcgtgggcattgggaattatgcagccagcctccgcaacgatcgttaaacatttcatgcagatggctctgcccgactcttgccaggacctggagacaaaagatgtgaaggtgcagttcgctaaaatgctgaagctgggtctgatctcacagagctcagaaaagattgattacgtgtattctctgacatggcttggcaacctctctatgaacaacaaattacgtgtccatagggataaagctaggctttttcttctgaaggacgctgcacaagccgcccacaaagaacggttttcggagggcagaggtctggagttaaccggcgatagtccggtgatggacctttcctcagacaagcagtcacgcagacccatcggacaggttgtagacagtgctgacctagcatactggagcagcacctttaagcagctcaagcatagcgccggccctctacctagatcctccttttccacgagctttggcttgtactcttttgcttcgtgcaacgagttacagttggcgtgccacaacatctgtcccaatactttcgacctggatataagctctattagtctgtgtataggcatttctccaagtctgttagtgtctatgtccaacaagcccgaggatcactacagaacctatgaaatcgggaaaaagaacggggggacacggatcatccattcaccacgcatttttcttaagacagtgcagtattggatcaaggactatatcctgcattcgctcaatattcacgatagttgtcacgcttaccagaagaataaatccatacagaccaacgccagtatgcacctaaacaaaaaattcctggcgaatgtcgacattaagaatttcttcgggtctatctcccaagaaaaattgcagaacacactggccactcgttactccaagaagatgagccaatgcatctctaggctgtgtactatcaataatttgctgccacaaggagcacctacttccccggtgctctcaaatttctacctgagcgaatttgatgccaaagtcgagactttctgtcaccatctgcagctggattacacccgatatgcagacgatctcacgatttcaggtaactacaaggacaatgtgctcaaggccatagatttcgccaaagacaccctcaatctctacgaactgaagttgaacgatagcaagacccgcgttgccagcaaacacggacagcagaaggtaacaggggttgtcgtcaatgagaaaatgcagccccctcggaagtttaggaaaaaaatccgagctaccttctatcaagcaaagaagatactcgccatcattcctactcggaaaaagagttgcgaggacattctcgtgatctga

SEQ ID NO: 14173 - RNA, 1476 nt, synthetic construct
  source 1..1476: mol_type = other RNA
atgacacagattcttaatgccccgagcatcattatggcgttaggggtcctacagcctgccactaccttcgaggtggtcggattcctgaagaccatgctgcctcacgccggcactctgccacaaccggatgaggttttggagttttttaaggaacgcgaggccgctggacatgtactgagagtagcccgaggcgatggtgggaccagtctgtacgcactgacgctggcagggcatagatacctgaacgtgagacagagacaggttcgggacaaactcaggttttacctgctccgtgatgctcgtcaagcccgccgacgaagttccgacggtgaggctagccgtcttgtgggagcttctcccacgttggacacctcctcacccataaaagggtctgtggcgaacaaatacggtcaccatgtgcccccaggaagaacctactggcccaggatatcaaggcagttcggagtctcgaccggcctgagcgcttcatccagcgacaccttccctgagtggctatccttccgggatcagcgccagtgcgaactggctacaaactttggcgaggggcagtttgaactggactttgagggcctggcagcatgtctgggcgttagtcctaagatcatctctcagattgcatccagcccaaataggcattatcggtcgttcgaaatcgccaagaagtctgggggttccaggacaatttcttctccccgagtgttcctgaaggtgattcagtggttcctgctcgactttatcctgactagcctgccagtacatcacgcagtgcactctttcagcttcggaagatctgtggtaaccaatgcccagacccatgagggacaggcctttgtcggctcattggacatcgaagactattttggcagtgtgactacgtccgcaatctttgagcttctagtcggctcagggttccgaaatcacgaggcccggctcatagcacgcttgagcacaaaggatgggggtcttcctcaaggagcccccactagcgccgtcttgtctaatgctgtgctgtatcccttcgatgagcaaattaataaagagtgcgcccgggccggtttaacatatacaaggtacgccgatgatatcacaatttcaggcgcggacaggagagaacttctgagggtcatggccctggcggagggccttttggctaagcacaatctccacgtcaacaaagaaaaaacccgcgtggtgagccagggcagtcaacagcgggttactggagtcgttgtgaaccaaacagctaagcctagtcggtatttcaggagattggtgcgcgccaaatttcacaacgcagctctcagtgaagaccacaacaaggttaaagtggaacagctatccgggtatctttcatacttacagatgtttccatccctcaagggctccaagctcttcgaaactctcgctcatgacttaagccgcgcacggcagaaagatccgccaatgctcatctga

SEQ ID NO: 14174 - RNA, 1125 nt, synthetic construct
  source 1..1125: mol_type = other RNA
atggtgggagacgcgcctacgctcgagagtagctcatccattaaaggctgcgccgcaaataactttggtcactcagttccccgcgtgcggacttactggccgagaatctcccggcagtttgatcggtccaccggactctccgcaccatctagcgacaccttccctgaatggttatcttttcgaaataggaggcagtgcgagctggctgtgggaatagaacgcgggcagtttaagttggattacgaaggtcttgcggccagcctgggcgtgtctgtgaagattgtttcgcaagtgagccgccggccagctagacactatcgatcattcagcatccagaagaagtccgggggtgaaaggaaaatttcatcccctcgcgtgtttctgaaggtgatgcagtggttccttgatgacttcatactggatggcttaccagttcattctagtgtccattctttcgtgaccggcaaatctgtggccactaatggaaaactacacgtatgccagagttacgtgggttcaatcgatatcgagaattactttgggagtataaccaaggcaatggtccagaggctgttgctggagaacgggttcctcgacgacgaggtcagtctaatttcagccttgactaccctgaacgacacactgcctcagggagcccccacttccgctacattaagcaatgctattctgtatggcttcgactgtgatatggcaatgtcttgtgaagaggccgggcttgtctatagcagatacgcggacgatatcacaatctcaggctcttcgagagaggctgtagaacgcgccctctccagagccaaacggcaactcgctaacaggagcttcaggacaaaccccagcaaaacacggatcgtgagcgatcgtgccagacaagtcgttacgggggtggtagtgaatgctgtagcccagccatcccgcacctatcgtagaaacgttagggcaaagttccacaacgcagctaaacagaaaactcccgcaggagtcgaaattagggccctggcgggccatctcgcctacttgaagatgtttagttcccttaccggcagtcgacaaatcgcagccctggagcgtgacctgcgaaaggtccgggctaagaagcaggagtga

SEQ ID NO: 14175 - RNA, 1467 nt, synthetic construct
  source 1..1467: mol_type = other RNA
atgaaaaaagttttaaacgcaaaaatggccttgctggcgctgggggtactgcaacccgcatctgctagggaagtgcgtgccttcctcaagttcgttttccctgagtccgggacactcccagacgtcgaagagtttgagcaatttctgagagaacaggagtcagtgaaccgcgtggtggaagtcgagcgtcggacaatggcctattattctctgaccctcctagggagtctgtacttaccaccagacattagaaagaagcgcgataaatttcgagcttatcttctgagggacgcccgcaggggtcggtttatcgagtcgagggagcttgggactgagctggcgggagttagccccgctagtgatacctccaccatcgtgaagggccgagccgcaaataatctgggtcggagttcatttggaagacggtttgcaaacggccaggcatactggccgcgaattcaggggcagtttattacgcgaaccggacctactaggagatccagagacacttttcctaatttgctttccttccaggatctcgatcaggctaagagggccaacggaaatgtgttctgcttcgactacagcggaataggcctgtgtctcggcctgtccccgcaacttgtgtggaatatctctcgtcgccagagctctcattacagggcctttcctgtagccaagaaggggggcggtacgcgcctcattgaatctccccgtgtcttcctcaaagtgatccagtggttcctaaacgactttgtcctgcacagactgcccgtccacgatgcggtacacagtttcagatttggacggagcattgccacaaacgcagagtgccataaacggtccatgtttgtgggcaacgtagacatcgagaatttcttcggtactattaccgaaggggctatcatctccctgctgacaaggaataacttcgcccctttggaagctatggcaattgctaaattatgccctaattggggcgccttgccacagggcgctccaactagtcctatcattagcaacgcactgctgtatgatgtggacaagaagatgtcggccgtgtgtgaggcgagaggcttggcttacacaaggtacgccgacgacatatctatttctgggccacggagacgcgacatcgctgatgcaatcagaatattcgaggccgccataagcgatttcggattgaagatcaaccaggagaaaacacggatcgcccaccggtcagggcaacagagggttaccggagtcgtggtgaatgaattcgctcagccctcccgcgcttttcgcaaacttgtcagggccaagttccatgccgcatcagtgagccccgataagggcgttcgaatgatccccgaactcggaggtatacttggctacctaaagatcttcccgtcaatgcaacagcgacgcgagattgccagctatggcgcgatcattaaatttctcaagagccagcggaccgaatga

SEQ ID NO: 14176 - RNA, 1644 nt, synthetic construct
  source 1..1644: mol_type = other RNA
atgcgcactgaagaacctactgtctggccattcccgtctgtgaagagacgcaccctgctgagggccctgttgtacggtgccgcctcaggtgcagcccttggtaccttgggattgagccccagagccggagagctcgcctctgaagagatcgtgctcaccatgctcggcatcctacagcccgcttctgcggaagaggtgttctgcatattagagctgttgcatgacgcagctgccgctgagggcatggctctcgacctggaacggcctagagctggcgagatttctgaagcagttgaggccctccagcgtcagggcgcaatcttgccagtgcaggccaacccggttcgccggtattccatgactgcagctggtaatcggagactgagccctagactgcgcgctactagagacaccacccgtctgttcctgttgcacggccccagggccaggatcatggagatgagcagggaaggaagagagggggagtctggcggagcatctcctccatcaaatttgcgtagtctaatagactcactagggaggcccttaggcagcacagaggatgatggcaaccaacctccaacccgcgcatggcctgtggctagacatcggctgtggtctaggcactgtcgcacttcaccactggctctttccagggacacttcgctccgctttctgtccttcgattcgctcgaacagctgaggctggctggagggaccagcggaatggtgtcccgactgcgattgtcacctcaaggcatcgccctcagtttaggcgtgtccctgcagtttcttcgatggctccgagacacacgctacgataggcattaccggtccttcgctatcccgaagagaggggggggcaaacggtggatagagtccccacgtatttttttgaaggtgacccagaggtttgtgctccaccatatcctgagtggccagcccgtgcacgatacagttcacagttttgtccctgcagttcaggcgggagaacttaggaacagcattacaaacgctcggagacatctagccaaaccctacgtcgccaagattgacatcaaggatttctttgggagcttaagaggatacctggtcgatcaggccttccaggacacagcgctcctaaatgcggacgccaggcgtctgctgagctcactgtgcacgcggaggaatgctctgccacagggagcgcccacatcccctatgatatccaatcttattctgcggcgattcgatgaaaacatggcaagactgtgttctgagctggaccttgtatatacgcgctacgccgatgacattacaattagcggggccgtacgcgaagatgtcgagctggccgcctggtttgccagaaaagggctcaccggagagcccctgactctgccagtgaacgaagacaagagtcgtatccttagcgcaggtcaacagcagcgcgttacgggcgtgatcgtcaatgagcggggtcttcctccccgacggatgagacgcagagtacgggccatgttccaccaagccgcattagacccagcacggcttagggaagagcgagcgaggctcggggggtatctggcttatttccgggcatttcccgattatccgagtggcgagttagctcgatacgcccgcgtcctcgctcaaaaatga

SEQ ID NO: 14177 - RNA, 1500 nt, synthetic construct
  source 1..1500: mol_type = other RNA
atgtcgctggctaccattcagatcggctgtaatttcccacctgagttgaatctcgataaagataaaaccactgtggtgtattggatcgcagctatcctacagccttcggataagtctacgattctgacgttcctcaaaagcatccaggatcatatttgggaaaacatctctcaggacgatataacccacagcttaaattatctctgcaagcagcagtatctcctaaagctcagcattggattgacagattacttcagtatcaatccagctaaacacatcaaacttagcatcaatgagcgacttaacaaagacaggatacgcttctttttactgaattgcggcaaggccgacaagtttcaaacagtaaggagaaactgtaaaatcaaggtcgacggagtgccaccctcttttgaagaacgacttccgatccagttgagagtcgagatccgcggtcggaggagtcaacccattatcagctcctgggttagtttgttagagtccaccctgttcacagtcagcccatccaccacacagttatcccccactcacaagtctctgtcatatcccaactacaacttcattgaccacattgacgcggatttgagcccccacatgacggttagacatatcctagctgcagatctgggtatcagtgtgcaactgatctctcggattcttgcaaacaagacccagtattacagaagttttgagatcattcggaagaatggaaataagcgcctgatcgaggcccctaggacttacctgaaggtgctgatgcgatacattaaccatcatctgctgacagggctggcgatacacgattccgtgcactcctatcgccagggcaaatcttttctgaccaatgctcagatacacgtagctaagcagtacgttttcaatctcgacatagagaactatttcggctgcattaacaaaagacaagtgagggaactcttttccataaatgactttacagcctcagccgccactctgctctcagaactgtgcactttcaacgaccgcttgccccagggtgcccctactagtccaattatctccaatgcgattctgttcaaaatcgaccagtccatgcatcgttactgtgaaaaaaacaacctctgttatactcggtactctgacgatattacactgagcggcaactcaagacagagcattgtcaaggccaagtctcgactaatcgcaatgatacatggggcagggttcaagatcaacgacaagaagacccggctgatgccttatcataagcaacagttggtgacaggagtggtagttaataaagaggcaaccccggcccggaatgaacttagacggataagggccaaatttcaccaggctgcctgctcatcacagctgccttacgctacccgttcacaacttctggggtatattagttacctcagccactttgagaaatacaggaacagcgagctccttcataagtactcccgcattatcgaaaacgtctcttttgtggcctga

SEQ ID NO: 14178 - RNA, 1458 nt, synthetic construct
  source 1..1458: mol_type = other RNA
atgacagtgacactaaatagggggttcatcctgtgggcagtcggggtccttcagccagtggcttcaggagagctcttgtattacatggaacacgttttcgagaatgcgggagcgcttccctctgagaatgatcttcactcatatctcgttgaagccgccaatgtgggccaattaatccggattatgcgggagcctgatctcttcagtctgactatacaggggaacagttatttgtccagatcacagcgcatgagcagggaccgtgaaaggatattcctcctggctgacgcttggaacgggcggaagttgacctcccgggaggagcaaactaccgagtctgggggtgtgagtccacctctgctgcagcgcactaccctggaaggtacgggcgccaatgaatgcggcccgtctgttccacgcggtcgaacacactggcccagatacagtaaacagctgactaaaaccaccgggtccagctcatcatcccgtgacacctttatcaatttcctaagcttcaacgacgctacgcaggtgaaccttgcaagaagagcttctggccgcgccattcagcctgatgccgtaaacttggccctcatgatcggactaacgccacgactgattagccagattattgtgaggcccgatagacactacaggtcctttcccatcaaaaagcgtacaggcggtgcgcgcgaaatccatgcccctagagtcttccttaagaccatccagcggttcattgtcgactatatttttcatgtgctccctcaacatgacgcggtgcacagttttcggaacgatagatccatcctgtccaatgcacagtgtcacgtaggcaaacagtgggtggccgggatagatgtggaaaacttctttggaagcataaccgagcgccatatcaattctcatctgagctctatcgggcttgacgcaccctcagctaggactctggctaagctggccactttgaatggagtgctccctcagggagctccgaccagtccaatattatcgaacagcgtgctgtacaactttgatgagttgatgtcggccgaggcagagaagcaatctttagtctacacccgatatgccgacgatatcacaatttccggatcctctatcgattgtatccgcagcctgatcgcatgcgctacactcttactgaatgacatgtacggtttggtgattaacgacaaaaagaccagagtactgagccggaggagccggcaggtggttacaggagttgtcgtaaatgacgttgctctccccccacgcgacctgagacgtcgaatgagggccgcctcatataatgcaactaaagtggagggcgtcaacgtggaagccctgaacatgcttaggggctacctcggctactttcaagagtttcccgacctggtcgataataaggaatttacagatttccggaagaacctgggcaacattagggcacgattctga

SEQ ID NO: 14179 - RNA, 1470 nt, synthetic construct
  source 1..1470: mol_type = other RNA
atggacagtttcatcggacatcagaccacactgtgggctatcggcgtcctacagccggtgtccgcctcagagctggtcgattattttaaggctctccttgacgacgccggcgatctgcctgatagccgcgagctccagcgtttctgccgcgatgcttctaaacgcggactcgtggtgagagtaagacggcgtcctgacctcttttccctgagcctgaagggcaatcggagactgagccgtgagcaaagactccttcgcgaccgagcgcgactgttactccttaaagagacaaagaagtcccgggtgcacgtgagccgggaagtccaagctaccgaactcgggggcgcttcaccatccgaagatgcatcttcaacaagccagggtgggagtgctaacaaaagtaggcctttagtgccaagaggattagcctgctggcccagattatcaaaggagctgctgataagacccagtcctgcctcacgagataccccccttgacctgctcagctttatgacatgggcccaggttgcaatcgcatgtggcaagacccaggaggagctgactttggattgtcattccatcggtatgatgctcggcgtcagtcctaaactgatccaacagctggcctgggatcctgagcatcactatcgcagtttcgaaattcccaagcgagccggcggtttgcggactatcgatagcccacgcgtcttcctgaaggtcattcagaggtttcttgcagactacatactggttcatctgcccatttcctccgcggtgacgtcgtaccgaattagaatgtctatccaggagaacgctcggccacacgtgggagccgaatatgtggcaaactctgacatcgaaaatttcttcgggtcaatcaaacacggtccaatcgtgaatctcttaatgcataacgggctaagggcatcttctgccaaactgattggagatctggttaccaagaaccgtagcctgcctcaaggagccccgacttctccgcccattagcaatgcgttcctttacatcttcgacgaatttatgttgtcttactgccacaccgaaaaggtgtcatacagcaggtacgccgatgacattaccatatctgggaataatcggtccgctatagaagacgccttggccatggcaaaaaccaaactactggtagagtatggcttgcgccttaatatggccaagacaagaatcgcatctaaacatgggcaacagaaagttactgggctcgtagtgaacgaaaggatttcaccaccccgcgtatatcggcgcagggtcagagctatttttcacaaggccaggctgaacaaacaggttaatgttgaggagttcaggcggttgaggggctacctcagttatttgaagtcctttgacgctctgcggcactccagtgaggtgcaggagcacgaatccactctatcgaagctgagcataaggagcacaaacgcggacacggtgtga

SEQ ID NO: 14180 - RNA, 1461 nt, synthetic construct
  source 1..1461: mol_type = other RNA
atgaagacaaagctgaataccagcaacttactgtgggtgattggggtgctccaaccagtgagcgccgaggagatcacgagttacctggccactgtatttgatgatgcgggaaccatgccaaaagggaccgatattcacaagttctgtagagagcagacagacaaaaaacacctgatcagagtcgcccgcgagcctgacctcttttccctgactcttctaggaaaccagtatctgagcgacgacctgaggaaaagtcgagatcggtcccgtatttacctgcttaaagaggcctataaggctcgcctgaagatgctcaggggggtgaaggcaactggactggacggtgctgccccttccgcagatgtacgcccaagtaagaaaggccctgaggcgaacaaattgggccccgtggtgccgtcaggccaagcttattggccacgattttctaggcaattgtcagagcagactgggagtctgcccacctccagggacacaccgcttcctttcctgtcattcgccaatagagaacagctggctgtggccataagaagcaagggcgaagcaggcagcattaatttcacctcccttggactcatgctcgggattagccccaagttgattcagcagattgcacaccatcccgaccgccactatcggagcttccagctgaaaaaagcatctggtggcatgcgtaatatcgagagcccacgggtctttctcaaggttattcagcggttttttctagactacatactgtcggatctgcccgtggatgacaacgtatattcattccgaaagaactactctatcgctcataatgctgaaagacatgtgggaaagcaattcgtcgccaatatcgatataaagaacttcttcgggtccatcacaagcgaaaaaatcctcagtctcctgcgcaaacatggcgtggagcagaggtccgccgtactaatcagcgccttggtgacaaaggaaggcattcttccccagggagcagcaacctctcctttactgtcaaattccctgctgctggaatttgactcgagaatgtcacgtctagccgaaaacgcttgcgccaattactcccgctatgctgacgacgttactttttccggcaatgaccgcgatgtcatcgctaatttgataaaaacggccgaaatcgagctgttacacgattatggactccagttaaacaaagacaagaccaggatagcaacacagcggagtcagcaaaaagttactggcctcgtcgttaacgagaaagtgtggccaagtcggaagttccgacggcagatcagagctgccttcaacaacgcgcggaagcaggaggccgtcgataagaagagacttgaaaagcttgccggttacttggggtacctcaggtcttttgacgttatgaagggttcacccgatttggtcaggtactcttctatcttagcatctctgaccgtggcgcctgattga

SEQ ID NO: 14181 - RNA, 1443 nt, synthetic construct
  source 1..1443: mol_type = other RNA
atgaagaatgcgcggatcaacgagagtctgcttctgtgggcggtgggggtgattcaaccagcctctccgggcgaggtaattgccttcatcgagcgcgtgacccagtctcagtttcccccaggtgtgttagagggggtaaccgcccagtgcagccactatgtggctcgcggtctgcttagggaagtgaataagcgcagaaattggtactcgcttacttacgaggctgaactccggataccgaaacggttgcgccggcgaagggacaggattagattattcttactgaaaggggcaagagccgcacgaatgagggctgtgggcgtccctcacacacagaagtctgttgacgtttcatcaacaagtagaaccagtgggggcgaagacattcaggaagtgccccgacccacgaagtcgtttggaaggggcgagcgcgctcaggaacgcttcccatggcccagaatcttcgaacagatatccgacgggagcggatctgctaccggtacaccaacacactcagatagttctaacgccaccaacccactcgcattctatacattttccggtcggcaccgcgctgctgctgataacccttatcctcttaacgtccgtgaacttggtttggccatcggcgttagtgcaaggctactgacttccatcggaaaatttcctaatcggcattaccgaaggttccagatacctaaggccaatggcacgaaccgagatatcgcgagcccccgtattttcctgaagactatccaatattggatcaaagactacctgctctaccgcttgcccgtacatgagacatgctatagctttatcagcggggtgagcatcgaggacaatgccgcctgccatgccggaaagaatttcgtcgcaaccatagatattcgggacttctttggatccattaccctcgagaacgtacagactgtgatgagaagagccgggcataccatatcattggccaggatcgttgcaaagctcgtgaccctagatggatctctcccacagggcgcccccacctcacctatcatcagcaacagctacctgttcgacttcgacagagctatgtccatgtggtgtgctaaacgtggctgttcctacactcggtacgccgatgatatcaccattagtggcgaaactcgctccgaggtccagcggtgtgtcgaccacgcagagtatcgactgaatcgttatgggctgaggctgaacgagggaaaaactcgcctgcaaagcaggggtgcaagacaggtcgtgacaggactggtggttaacgaattggcgcagccttcacgggagcaacgcagaatggtccgggcaatgctccaccgttaccaaacgggcattatgagggagcccacagatattgccagactgagaggctggatttcttactttcactcctttgaacatctgagggaaaagtttccacggatctga

SEQ ID NO: 14182 - RNA, 1434 nt, synthetic construct
  source 1..1434: mol_type = other RNA
atgagccatacgaggatcaatgaatctatcctcctgtgggcaattggggtgatacagcctggttcaccggccgaggccatcgagataattgaaaaagccaccaagtcaaagctgcctcctgggtccgcggagggaattactttacagtgcgagcactatgttcagagaggcttactacgccttgtccacaagaaaaagaactggtacagtctgacgcacctcggcgacgtgtctataccaaaagtactccggaggaggcgcgaccgcattcggctttttctccttaagaatacttggcagagtcgtatcgctgacgtgggtgcacccgtcatgcaaaagtctgtggacgtgtcctcaaccatgcagaactccggggagtacgtacaggaggttccccggccaactaagagttgtaacagaggggaacggggccacgagaggtttagatggccacggatatatgagcagatgaccaagggtagtggaagcgccaatggcgctcccacacccccagtgacacctaacccgctgaccttttatacattctcgggtaaacaccggggcgaaatcgagaacccatatcctatcaatgcccgagaactgagcctggccatcgggattagcgcccggctgattacatctatcgcgaaaatccccgaaaagcattacagacgcttcaagatccccaaagccaatggatcttttcgtaatatagctagtcccaaactgttcttgaaggtgatccagtactggctcaaggactacttgttgtttagacttcctattcacgaaacctgtttttccttcatcaaaaacgtcagcattgaagataatgcttcccctcatactaagatggcatatgtgggcaccattgacatagaagattacttcggatccatcaaggtgaccgccgtccaatccgtgctgaaaagagcaggattcactgcaagcgcttcaagaatcatttcgaaactcgtcacattggatgatgctctgccccaaggagctccaacaagccccattattagcaacacgttcctgtttcgattcgacgagttcatctctaggtggtgtaagactcatgaatgcacttacaccaggtatgcagacgatgtcaccatctctggcatgaacaagagctccgttcttcagtgcatagatcgagctgagatcctactgaaccgttacgggctgaaactgaattcaaagaaaaccaggattcagtctcaaagtacacgccaggttgtaacaggcttgaccgttaacgagctcgcccaaccatcccgcgaacagaggcggaaagtgcgagccatgcttcataattaccagatcggaaagctgaacgatcctaaggagattcagcgcttacgaggctggatcagctattttagatcattcgaccacctcaaagagatttttcagatgccggcgtga

SEQ ID NO: 14183 - RNA, 1458 nt, synthetic construct
  source 1..1458: mol_type = other RNA
atgagcctgccgagaataaatgagagccttctcctgtgggctgtgggcgttattcagcccacttctcccctggaaattgtgcagttcatagagtacgtgacaagggggacagtacccccaggtacactcgaagggattgagcaacagtgtcagcattatactaaacgcggattgctgcgaagtgtgtccactaggcacaactggttttcactcacgtatgcaggtgatgtaagcatccctaaggaaatgaggcggagacgcgatagaatgcgtctgtttctactgaagaaatgttggcagtcaaggatccaccatgtgggggtgccacgctcccaaaaattgattgatgttagctctatcagtcagcattccggtaaagatattcaggaggtcccccgccccacgaaatcatccaatcggggggaacgaggaagagaaaggtttcgctggcctcggatctttgagcagatcccaataggatctggttctgccattggcacacctactccgccgccacctaatacccttacattcttcacgttttctgcacagcaccggagtgaagctgcgggcaatccctatcctattaatgccaaagagttggcactgggaataggcgtgagcgccaggctgctgacaagtatcgcaaagactcccgagaagcactaccgtaagttccagattcctaaggccgacggcagccacaggaatattgctagtcctcggctttttctgaaaatccttcagtactggatcaaagactacatcctattccgtctcccaatccaccagtcctgctacagctttctccccggggtgagcattatcgacaacgccaccccccatatcgggaagaacttcgtcgccaccattgacatcgaaaacttctttgggtccatcactcagcagggcgtgcagtccctaattgtgcgggctggctataccgccgccttagctcggataatctctaagcttgcgactttggataacaccctccctcagggagctccaacctcgcccattatctctaatagttatctgttccggtttgaccaatcaatatccgcatggtgcgccagactcggatgtacatacacacgctatgctgatgacatgactatctctggaaccgacagagtgacagttaataactgcctggagagagccaccaatttactcaaccgttacggtctgaagctcaagagctccaagaccagaatacaatcacgaggcggacgacaagcagtcaccggcctggttgtaaacgagattgtccaaccacctagggaacagagacgcctgatccgatcgatgatcgataggtaccgcagggacttactggacccagcggaccttaccaaattgcggggctgggtcagttatttccagtcattccaccatctgaagaacaagtacaactacgatgagatcagcgacttggagaaggataaaatttga

SEQ ID NO: 14184 - RNA, 1560 nt, synthetic construct
  source 1..1560: mol_type = other RNA
atggcaatcgcaattaatcagaacctcctgctttgggccgtcggaaccattcagccagctaacagcgatgaggtagccggtttcatttctcacgtaacccaggactctatcccagaagacattcccttcttcttcagggaccagctgagacggctggccattgaaggcctagtggttcaggtcagccaacgggagggactgttctccctcaccgaaagagggaatgaccgtctcagctctgaactgaggcggttacgtgacaggatccgactctttttactgaagaaggccaagaacgtgcggaaagcccctttgggggaccgccaacaaatgggtggcgccagcccgtccggctcagaaaagattcttcttaaggaggtggcaagacccatccgcacaaccgctcttccccacgggaggacgaactggcctcggatcggtaagcagttcttgcatcgcaacgtcgagagaagtccaagtatcccccccacaccgaccttcccggctaatcgagtacggttttactgcaccgatgggcctttcgatggaacgactagtgaggtgaactggctggcgctggcaataggaatctcgcccaggctgattactagtttcattcacaagtctgagaagcactacaggcattttcccatcgcaaagaaaaatggcggcgttcgcaatatcgatgctccacgggtgtttctgaaaaccgtccaacactggattctggactatatactggtcgatctcaactcacacgctaaatgtttctcctacaggcgagggtttagtatagaagataatgccgcaattcacagtcagcagggattcgtgtacaatattgacatcgagaactttttcggctccatatccacgtcagccgtgaatcagactttaaccaaacagggaattcctcccaaactggctaaattgttaagctacctctgtacattcaaagggtccttgccccaaggtgctccgacttccccagttattagcaacagctacctgtatgactttgatgtgttcatcgatagaatatgttaccagcttggctgcaactatagccggtacgcagacgacatcaccatctcagggaatgaattttctaaggttggagagtgcattgccgccgccgaacaacaactccgcctgttcagactgaaaataaacacagccaagcgccgtgtgcagtcaaagaacacacgacagctggtgacaggtttggtggtgaatactgatccaaaaccacctcgcacctatagaaggcagatcagagcgtttttccatcagatcaagaatgtccctaatgttgaccccaagggccagctatgcaagatgtacggctactattcctatttgtccagctttaaagctctgtctgagaacaaggagctaatcggctataggcgacagatcctggagtttaagtcaatccatttccctatcatgcatatgcactctaaagatatggaagagctcgacctttttactcagcctgcgactataacagagacagattcgttttttgaactcccagccgagccagctcctaactga

SEQ ID NO: 14185 - RNA, 1497 nt, synthetic construct
  source 1..1497: mol_type = other RNA
atgactgtgagggtcaattctcaactgattatgctttcactgggcatcattcagcctgcgagcccttccgcggttgctaaatttttgagcatgtccttgctagagaattcagcccctattgaggagcagattctcatgcccttattcgagaagtggggggccgagggactgatagtgagggtgcatactaagctcaagctgttcagcctctcaagtaaaggcaaccatatccttacaaaagaaatgcggcacctacgagacaacactcggctgtttctgctcaaggaactgagagacggtactttggcacccctgggtgagcttggaaaagaagaacttacggacgcctccagcgtgtcactaatcgatctggtgatccaggaggaagagcgtccaatcaatcccgctgtgaccttgggcaaggcacagtctgacgggcgcgtttactggccgctactcgccaaacagctgttcgtcggttctataccacagtccccatctccacgatttagatacggctcgtttcagtcgttagatagctgccatatggctcatccctatggcgcccaggaaaatgatttcaatctcattgacttgtcgttgtgtatagggatttccccccgtcttctgtcctccttcctgtattccagcgagcaccattacaggctgtttgacatcgctaaaaaaaatgggggcacccgtacgatacgaagtccccgcgtaatgctcaaaacagtgcagtattggatacttgatcacctcttgcacaagctgcctatccacgatagttgcaagtcctacagaaaggggctgtctatcttcgacaacgctaaaagtcactgtgatcagaactacgttggcaacttcgacatcaagaatttttttccttccattaccaccactagactcactaaccacttcaggctgcatggatttccggagaatgcaagcaggctgatcgccaagttactgaccgtaaacaatgagctgcctcaaggcgctccaaccagccccgtcgtcagtaattcttacctcttcaaattcgatgaagtcgtgtctaacttctcaaagaaccttgagctgaattattctcgatatgcagacgatgtaacaatcagtggggccaagagatctgacattcacgcggttatcgccttttcaaccaacgagttggcccggtatgagttattacttaatcccaagaagaccaggattgctggtcggggcagccggcagatcgtgacaggactagttgtgaacaaggtggcccagccaccaagaacctaccgccgccaggtccgcgcaatgtttgataatgcaattaacaatcccgaagaattcagaagtcggctcagcgagctgtctggacacctgagctacctcggatcatttgaaaacctgcaaaactcccagagcatcgaacgctataaggagacactcaaaaaactgaggacacatctgtcagtgaacaacctgtacccgagtcctcaacaatga

SEQ ID NO: 14186 - RNA, 1464 nt, synthetic construct
  source 1..1464: mol_type = other RNA
atggcagtccgccttaatcctcaggctagtttgttatctctggggatagttcagcccgccagtccagccgaggttgccaatttcatcgaacagagcttattgaaggggaagagtaaggtggacctgaacgaactaaccctgctgtttgaaagatggaagacagatgggctgatccagcgtgttcacgctcgggagaacctttattcgctaagcgccactggcaatcattctctctccaaggaaatgcgccatctcagggacaaaacgcgcctgttcttgcttaaagacctccgcaacggatcaattagactgcccgaagaagcaaagagcgagctggctgacgtgtcatcggcctctttgaatgacctcgtgtctcaggaggagcagcgacccatttctgcactcaccccgctcagaagtacccacagaagggaacccgcatactggccactcttaggcaaacaacttctggtcggctcaacagtgcggtccagtggtacccgcttccgttttgggtcattcccgagcttgaaagcctgccatgccgcccacaaaaacggggcagatggtacggattttaatatctctgatctggcgctgggaataggcatttcggccagactgctctccagtttcacacacaatgctcggaaacactaccgggagtttgagatccctaagaagacagggggtgtaaggaggatctgtgcccctagaactatgctcaaggtagtgcagtattggatcctggatcacattttatacaaactccctgtacatagcgcatgctactcctttaaggaaggcgtgtcaatctatgataacgctgtggttcatctgaagagcaactacgtgggcaattttgacattaaggactactttccttccatcaccatggacatgctgaaagacttcctgattaccaacggttatggccagatcgcaagcaacataatctcccgccttactacttttgaaggatctcttccccaaggagcgccaaccagcccactgatctctaacgcgttcttgagcggtttcgatgaagaaatctccgtgtacgtcgctgagaacggcatgcagtataccagatatgcagacgacatcactatatcaggcgctgataggggcaagatactatccgccattgagttcgccacggagaagctgaaagatcttaatttcctgctgaacgagaagaaaacacggatcgctggaagggcctcccggcaagttgtgactggactggtcgtgaacgaaattgtccaacctacacgttcctaccggcgacaggtgcgagcaatgttccaccatgctagtaagtaccccgaggagtttcaggccaggacaaaacagctgggagggcacctcgcctatttgatgtcatttgagaatatccgagagactgcggctattagcgagtacaaaaggattctagtctctattaccaatccaagcccatga

SEQ ID NO: 14187 - RNA, 1500 nt, synthetic construct
  source 1..1500: mol_type = other RNA
atggaggagtctactaattataagctgcttgtttggggactgtccgtcattcagcctgccactcccaacgaagtcttaaactatttgactagcacgctcaacgacaatggcttgttgcctgatgtggaaaaaatgattcactacttcgagctgttagaccaactggggtacattcatcaagtgtctaaacgcaataacctctatagtctcaccccaagaggtaacgaacggttgacccccgcacttaaacgcctgagggacaaaattaggctcttcatgctggacaattgtcattctattagcaaacttggggtactagcatccactgatacagaaaatatggggggcgatagccctagcctacagctgaggcacaacctcaaggaagttcctcatccatcactgtcctgggcagctggcaccctgccaagttcaccccgacaagcctgggttaggatctatgagcagttgaacattgggtcgatgagctccgacgaagccagtacaccaaccacggctcggaatgccccgctgtcttttgtaggtagacttggattttccctaaactactactcctttaacaagatcgacgagccactcttcaataatgacggcgtgaccgccatagcatcctgtataggaatcagccccggcctgatcaccgctatggtgaaatctcctaagagatattatcgcaccttcaatttgcgcaaaaaaagtggcggcttccgtagcattctggctcccaggaagttcataaaaaccatacagtattggctgaaggatcatgtccttaatcgtctgaagattcactcatcatgctactcgtacagatcgggagtaagtatcaaggacaatgctatcaaccacgtgaaaaagaagtttgtcgccagtatcgacatcagtgattactttggttccataaacaagaagatggtcaaggactgcttctataagaataacatcccagatcacatcgttaataccatcagcgggatcgtgacatataacgatgtgctgccccaaggtgccccgactagccctataatttcaaacgccattctgttcgaatttgatgaggagatgacagctcacgcacttactctcgattgtatatacacacgatactcagacgacatttctattagcagcgattacaaagagaacatcgcgattttgatcaacatcgccgaagctaacctgctatccgcagggtttaccctgaatagacagaaacagaggatcgcgagcgataattccagacaggtggtgacaggcattctggtgaatgagtctatccgacccactcggtgctatcggaaaaaaattcgctctgccttcgaccatgccctgaaggagcaggatggatcccagctcacaatcaataagctgcggggatatctcaactaccttaagtctttcgagacgtacggctttaagttcaacgagaagaagtacaaagaaacactcgactttttaatcgcgttaaagcagtcatga

SEQ ID NO: 14188 - RNA, 1062 nt, synthetic construct
  source 1..1062: mol_type = other RNA
cgccaggcatgggtccgaatttatgaacaactaaacatcggcagtatgtcatcagatgaggcatctaccccaacaaccgctcggaatgcgcccctgtcctttgttggccgactcggattctccctaaactattatagcttcaacaagatcgatgagcccctgttcaataacgacggagttactgctatcgcatcctgcattggcatctcgccggggctcatcacagccatggtcaaaagtcccaagaggtactaccgcacatttaacttaagaaaaaagagcggaggtttcaggcctatcctggctccccggaaattcattaagaccattcagtattggttgaaggaccacgtgctgaacaggcttaagatccattccagctgctatagttatcggagcggggtgagcattaaagataatgctatcaaccacgtgaagaaaaaatttgtggcctcaatcgatatcagcgattacttcggcagcataaataagaagatggtgaaagactgcttctataagaacaacatacctgaccacatagtaaacactatatccggtatcgtgacgtacaacgacgtacttccacaaggggcccctacttctccaattatatctaatgccattctcttcgagtttgacgaagaaatgaccgctcatgcactgacactcgactgtatttacactagatactccgacgatattagcatctcctctgattacaaggagaatattgccatccttatcaatatcgccgaaaccaatctgctgtcggccggatttacattgaatcggcagaaacagcgcatcgcatctgataattcacgccaggtggttactgggattctggtcaacgagtcaattaggcctaccagatgttaccgtaaaaaaataagaagtgccttcgaccatgcgctgaaggagcaggatggcagtcaactgaccattaataaactccgtggttacttgaattacttgaaatcctttgagacgtatggcttcaagtttaacgaaaagaagtacaaggagacattagactttctgatcacccttaagcagtcttga

SEQ ID NO: 14189 - RNA, 1500 nt, synthetic construct
  source 1..1500: mol_type = other RNA
atggaagagagtacgaattacaagctgctgttatggggtctgtccgtgatccagcccgccacaccgaatgaagtcctcaactatctaacttctacgctgaatgacaatgggctcctgcctgaggtggagcgaatggttcactactttgaactcctggagcaacacgggtatatgcatcaagtcagtagacgcaacaatttgtattcactcactccccgcgggaacgagcgactgactccaaccctgaaaagactgagggataagatccggctctttatgctcgacaactgtcacagtatctctaaactgggcatgttggcatcaaccgacaccgaaaatatggatggagactcaccatccctccaacttagacataatagcaaggaggtgccccatccttcgcttccctgggctgctggtgcacttccgtcttctcctaggcaggcttgggtgcggatctacgaacagttaaagattggctctatgtctagcaacgaagcctccacaccaccaaaacggaaaatcagtagcttaccttccattggacggctgggattctctcttaactattacagcttcaatacactcgacgatcatttgtttaacaacgatggggtgacagctatcgccagctgtataggcatttctcctgggctgcttaccacaatgatcaaatcacctaagagatattaccgtactttcaatctgcagaaaaaatccggaggctttcgtccaatcctggcaccccgcaaattcattaagactattcagtactggatcaacgaccacgtgctgaacagactgaagattcactcttcctgctacagctaccggaagggcgtttccgtgaaggacaatgccatcaatcacgttggcaaagcctttgtagcatctatagatatttcggactatttcggttccattaataccaagatgatcaagtcatgcttctacaaaaacaatatcccagagcacgtcatcaacgctatcagcgggatagtaacatacaacgatgttttgcctcagggagcccccaccagcccgataatcagcaatgcgattctttttgaattcgatgccgagatgacttatttagccttgagacacaacagcatatatacgaggtattccgacgacattagcatttcgagtgacaaaaaagaaaacatcgatgagctgatccgcgtagctgaggccaatttgctttccgtcggatttaaactgaacgagaacaaaaggcgcgtcgtgtcaagaaacaataggcaggtggtgaccggcatattggtgaatgaaagcattaggcccactcgtacatatcgaaagaagattcgcagtgcgttcgaccatgcattgaaggagaatgataataaccagctaaccattaacaagctgaggggttacctcaactatctaaagtcctttgaatcatacggctttagtttcaacgagaagaagtacaaggatatcctggatttcctcctgaccctccaacagcggtga

SEQ ID NO: 14190 - RNA, 2154 nt, synthetic construct
  source 1..2154: mol_type = other RNA
atgcctggcaataaaggcgaacttatcaatatacggaacaaaggggatgggaatacgtttaacatcatccaaataaacggtggtaatgcgcccgatatatccaagcagctcggcttcctgggtctagacataatcgataatacgaaaaagtcactggtaagcgaattctcttcgggcaacaataacgtcttgctctgttatccaaataaggaagataagattctcgagcccataatcgagaaaatcaaagcgggactcagtaatattggagcaaatatctttgagggatcgggcaagacccagctcccagacgttcagggttatccccatattgctgagatcgatttcatcaagaatctgaagtgcgattcaatcatcattttcgtgctggacgagctgacactatctcaactcacactgttgagctactacaaaattgagagcaacatacagcatgttgacatcattgcaatacctagcgactcaattttcaactacgacaaattcctttccaacgggctgattcagtattgcgacgataataactgcaaagtgattaagctttccacactggatgatgctgaagtggaaagggtgattgccagggttaaaaataggaagatgatccaggcccgccggggcattatgctgactaaagccgacgcctatgactttaaccacaaactgtttatatgggcactgtcggtcattcaaccagcaagcccttacgaagtgatttcctatctgtctatcatactaaatgacaatggcgtgttgccggccaaggacaaaatcaacgagtactttaaagcactagctagttctgagtacattaatcaggtcagtaagaagaacaatctgtatagtatctctcttaacggtaacgaacagctcagccctgagctgaagaagctgcgcgataagctgcggatatatttgttagataagaccagggtggtatctaaagtcaaggtgttggcatcaacagaatccaaaaagatggggggagccagcccgtctagtcagcttcgcttcgtcctcaaggatgcaccacatccctcagtgccttgggcgcttggagcattacctaatcatccacgcaatacttgggtgcggatcgccgagcagattaacttcggatccatgttgtcagaggccagtaatactgaaacacacgtgaaccagacgcagcataccatctttcccctgaattatggcagctacaacagtatcgattacaacttaattggaaacacaggtccaaccattctggcttccctgatcggcgtctccccccacttaatcgccattatgagcatgaatcctgacaagtattatagaagcttcaagctgaacaaaaagtccggaggccacagagagatactggctccacgtaagttcatgaaggtaattcagtactggattaccgactatttcctctttcgactgaaaatccatgccagctgttactcttataggaaaggcgtcagtatcaaagataacgctattaaccacctgaacaacgagtttatcgcaaatattgacgtaatcgatttctttgggactatcaataaggatatggttcaaaagtgtctcattaagaacaaaatcgacatcaaactcgctaccgccatcaccgaaatcgtgacctttaaggggtttctaccccaaggcgctcctagctccccccagatctcaaatgccatcctgtttgactttgacaacaaaatctctgaagcttgctacgtgataggctgtgtgtatacaaggtacgcggatgacatcaccatatctgggtctaaccgtaacaatgttattaagatggtgaaatccgccatgcagtggttgaatgagtccggattctctgtgaatgacaagaaaactagaattagctccaaaaacagtcgccagatcgttactggaatactcgtcaatgacgttattagaccgactcgaaaataccgaaagagagtcagagccgctttcgaccacgcccttaaagacaatgatcactcaaaggagacaatttacaagcttagcgggcacctgaactacttaaaatcattccaacagtatgggtacgaggtgaacaccattcagtacgaactcatcttgaagtacttgaagcggaagaacatcctgatcaagatttga

SEQ ID NO: 14191 - RNA, 1497 nt, synthetic construct
  source 1..1497: mol_type = other RNA
atggaggtgaacacaaattttcgcctccttctatggggcgtgtcaattatccagccaagttcccctgacgaagtgctcggctacctgaaggctgtcttgaacgacgacggtctgctacctgaaattgaagtcatggaggactacttcgataagcttaagaaaatcggttatatcgaacaggtttctaaacgcaataacttattctccatcaccccccaagggaatgaaaagctgccacctcgcttgaagaaactgcgagacaaaatcagaattttcctgctcgataagtgctatatccagagcaaacttgagcgtctggcctcgactgagactgagaaaatgtccggtgatagcccattcctcaccctgagacacattttgaaagaagtcccacaccctagtctcccgtgggcgacaggaactcttcctagtagaccgagacaggcctgggttcgaatttacgaacagctgaagatcggctcgaccttcggagacgaggcgagcacatctatcacagacacctctccctcagaagtgaagaagaatattctgtctctcaacttctactcctttaataacctcgagcacaattactttaacaacaacggggtgacaatcatttcctcctgtattggggtatctcccgggttattaaccagtatgattaagtcaccagagaaatattaccggccctttgagcttaccaagaaaaacggcaaaaaaagggaaattctggcacccaggaagtttatcaaggtcactcagtactggatcgcagaccatctgttgaaccgcttgaagatacattcctcatgcttctcctacaggaaaggtgtgggcattaaggacaacgcctataatcatgtcggcatgaagtttgttgccaatattgatattacggattacttcggcacgatcaacaagaccatgattaagaaatgtctcctggacaataagatcccaataagtattgttgaggtgatatccgggcttatcacatattatggatacctgccgcagggagctcctactagccccataatcagcaatgccatcttacatgatttcgatgagtctatgtgcgaatcagccctgcacttcgactgtgtatacacccgctattctgatgatatcaccgtaagcgggaattctagggagaaagtctttcttctgacgcgggtggcagccaaactgctggagagaaggggatttagtataaacgaagagaagacacggattctgagcaccaacaatagacaggtggtgaccggcatcctagtgaatgaaagcctccggcccactcggaaatatcgtcgaaacgtgagggcagcttttgaccaagctataaaaactatggatacaagcgacgatactttgaattcactgaagggacacctgaattatttgaacagctttaagcaatacggcttcaaattcgaccacgagaagtatcagctcatcatcaatgagctgatcaagaacaaggatataaactga

SEQ ID NO: 14192 - RNA, 1461 nt, synthetic construct
  source 1..1461: mol_type = other RNA
atgttgttatgggctaactccattattcagcccgcatccccattcgagatatctcagtacctgaagatcatactggccgacgatggtgcgctgcccgatctggaatacctcaagcagtatttcaaagaattgcagaagaacgggtacgtggaggtggtaagcattaagaatgaactgtactcactgacccccgctggtgaagacaaactctcagccaaccttaaaaagttgcgggataagttacgtatcttcctgttagacaaatgcagggagtcctccaagttggagacactcgcaagcacagagacgaagaatatgggaggggagcccccatctcttcaacttcgcccctatatcaaggaagtgcctcatccatccctgagttgggccagtggcacactgccttcccgtcctaggcaggcttgggttagaattttcgaacagctgcgcattggctcaatgtcaagttctcaagcctccgcatttagcaagaatactggcctgtttactccagagaaaaagtatgtcgcagctcccctcttctattcatttaaaagcctcaacaacccgctcttcgataacaatggggtcctcacaattgcgtcctgtctggggctcacacctcgacttatatcttccatgattaaaagcccagaacgctactataggtttttcgagatgaagaaaaacaacggaggagtcagaaagattagtgccccgaggaagtttctgaaagtaacacaatactggatcaacgactatttccttaacaggctaaagatccacagttcctgcttctcttaccgcaaaggggtgagcatccgggacaatgcctaccctcatcagaattcaaagttcgtggctaacattgatatcgagaattactttggcagcataaataaaacgatgatcaaagggtgtctgctaaggaacaatatctcggaacaccttgttaatactatcgccggtttaaccactctgtttggaactctgcctcagggcgcaccgaccagcccaaatattagcaatgccattttgcacgactttgatgagataatgaccggccacgccatcgtgcgaagatgcgtctatacgcggtattcggatgacataactatctctggcaatgaaaagcacctggtcgaggagctcgtgggtctagctggaaacaaaatcaacgctattggattcgccctcaacaattctaaatatcgccttttgtcttacaacaaccgacagaccgtgacagggatcctcattaatggccatctgcggcccacccggaagtacagaagaaaagttcgggcgatctttgaccaagcactgaagagtaatgacagaaatcctctgaccctgagcaccttaatgggacacctgaactacctacagtcatttaagaaatatggctttcgtttcgaagaggagaaatacctgttcatcatccataagttgaagaactga

SEQ ID NO: 14193 - RNA, 1485 nt, synthetic construct
  source 1..1485: mol_type = other RNA
atgtcgaactctattaatttcagactcctactgtgggcaaatagcatcatccaacccgcatcgccactcgaaaccctgaattatctgaaactcctcctagccgacggcgagactctgcccgacatcgaatccatccggctctacttccgtgaactgcagaagattggttatttagaggtggtcagcatcaaaaacgagctgtattctgtgactcccgccggggaagataaattaactgccaatcttaagaagctgcgcgacaagttgaggatatttctgctagacaagtgtcatgaatccaccaagctggaaaccctcgcttcaactgacacaaagaacatgggtggagagagcccctctctgcagctcagaccatatataaaagaagtgccacacccaagcctgagttgggcaagtggtactcttccttctaggcctaggcaggcttgggttcggatctttgaacagctgaggattggatccatgtcaagcagcaaggcctcaagcttcagtaacagtattgagtttctcaatacagagaagaaacacatagcagcgccgctcttttactcctataagagcctgaacaatcctctgttcgaaaacaatgggattctgaccattgcttcatgcttgggcctgaccccgaggcttatctcctccatgattaaaaaccctgagaagtactacagattttacgagatgaacaagaaaaacggaggggttagaaagatttctgccccccggaaattcttaaaagtaacacagtactggatcaacgattactttttgaatcgcctgaagatacactcttcttgtttctcctatcggaaaggcgtgtcgattcatgacaatgcctacccgcaccaggattctaaattcatagccaacatcgatatcgagaactactttgattccattaacaagaccatgatcaaaaactgcttactgcgctgcaacatctccgagaatcttgtcaacgctatcagtggcttgacaaccctctatgggactttgcctcagggggctccaacaagcccaagtatcagtaacgctattttgcacgattttgacgaggcaatgacgaaccaagcactcgtgcgcaattgtgtctatacccgatatagcgacgacatcacaatctctggaaataagcggtacctagtcgaggagttggttggtttagcccgaaacaaaatcaacaacctggggttcacgctgaataattcaaagtacagactgcttagctataataatcgacaggcggtgaccggcatacttgtaaacggccctctccgccccacacgtgcctataggcggaaggtgcgtgccattttcgatcaagctcttaagagcaatgatagaaatcccctcactctgtcaacgttgaaaggacatttcaattacctgaaatccttcaagaagttcggcttttcttttgaggaagataaatacctgtccattcttgacaaactgtcaaagtga

SEQ ID NO: 14194 - RNA, 1488 nt, synthetic construct
  source 1..1488: mol_type = other RNA
atgtcaaacagcatcaactttagactgctcttgtgggccaccagcatcattcaacctgccgcgccgtcagaaatcctgtattatttgcgactcatcctgacagatgatggggcactgccaaatatcgatagcttaaagcagcacctaaaagagctgcacaagattggatacgtcgaactcgtgtctattaaaaacgagttgtactcgataaccccatctggagacgagaaactgagcgcaaatctaaagaagctgcgggataagctgagaatcttccttctggacaaatgtcataaaagtacaaagcttggggtattggcctccaccgatactaaaaacatggacggtgctcccccttctctccagttacgcccctatattaaggaggtgccgcacccttccctgtcatgggcttccggaaccttaccaagcagacctcgtcaagcatgggttagaatttttgagcagctccgcattggttccatgtcaagcagccaagctagtatcctgtccaaggacagtgactctctcatcccagaaaagaaaatcatcgcagctcctatcttctactcgtacaagtccctgaatagccctttgttcgaaaacaatggaattctaacagtggcgtcatgtattggtttgacccccaggcttataagctctatgatcaaaaatcccgatcgctattatcggatctttgacatgaggaagaagtccggcggggtacgcaagatcagtgctccccgcaaatttatgaaggtcactcagtactggataaacgattacttcctgaacaggctgaatatccactcctcttgcttctcttaccgaaagggaatttccatacacgacaacgcctacccacatcagaacaacaagtttattgccaacatcgacattgagaactattttggctcgatcaacaaaacgatgattaagaattgcctgcttcggaacaacatcagcgaacatatcgttaataccatagcagggctcacaacactctacggcacacttccacagggggccccaacttcccccaacatcagtaacgctattctgttcgaatttgatgagttaatgaccaatcaggccctggtgcgggactgcgtttacactagatatagcgatgacattactatctctggcgacaatcggcacctcattgaggaattagtctcactggcgaagaacaaaataaattctatgggctttacgctgaataacgcaaagtatcgtctattgagctacaataataggcaggccgtgacaggcatactgattaacggtcctctgcgaccccccagggcctatagaaggcgggtgcgtgctattttcgatcaagccatcaaatctaatgaccagaccagtcttacgattaatgccctgaaaggacatctcaattacctgcagagtttcaagaagtatggcttctccttcgaagagactaaatactcacttatcatagagaagctcaccaaaaaatga

SEQ ID NO: 14195 - RNA, 1494 nt, synthetic construct
  source 1..1494: mol_type = other RNA
atgagcaattccatcaatttcagattgctgctctgggctacctctattattcagccagctacatccgcagaaattctctactacctgaagttagtgcttgcagatgatggagccttaccggacgtggaaagcttaaagcagcacctgaaggaactgaaaaagcacggttacgtcgagatcgtgtcggttaaaaaggagctttactctctaacaccggcgggggatgagaagctgagtgcaaatctaagacaactgcgggataaactgcgaatttttctcctcgataagtgttacaagtcaaccaagtttgggctgctcgcctcaaccgacacaaaaaatactgggggtgaatcccccagcctgcaactccgtccttatatcaaagaggtgcctcatccatcactcccttgggcaagcggcacattgccttccagaccacggcaggcttgggtaagaatttttgagcagctgagaataggcagtatgagcagtagtcaagcctctacgttgtcagaggactcgaataatcataattttggcgactcctttgtcgcagcgccgaccttctatagctacaagtctctgaaccaccccgcctttgaaaataacggggtgctgaccatcgccagctgcattggtctgacaccacggctgatcagttccatgatcaaaaatcccgagcgctactatagggtatttgagatccccaaaaagagcggaggggcccgcaaaatatcagctccccggaaattcatgaaagtgactcagtattggatcaacgattaccttctgaacagactcaagatacattcatcctgtttttcttatcggaaaggtacatctatacacgacaacgcctatcagcatcggaacaacgacttcattgccaacatagatattgagaattacttcgggtccatcaataaaactatgatcaagaactgcctactgaggaacaatctttccgagcacatcgtgaacaccatcgctgggttgaccaccttgtacggaactttaccccaaggcgccccaaccagccccaatatcagcaacgccattctgtatgatttcgacgaaactatggctaaccaggcaaaggctcgcggctgtgtctatacgaggtatagtgacgacattacaatttccggaaacgaccgctactctgttgaggaactagtgggaattgccaagaacaagatcttctcactgggcttcaaaatcaacgaaagtaagtaccgattgctgtcttacaataatcgccagctggtcacgggaatcttaataaacggccctctcaggccacctaggctgtaccgaaagaaggttagggctatcttcgatcaggcgctgaagtccaacgattgccgtacttctacacttaacaccctgaagggccaccttaattatcttttgagcttcaaggtctatggcttcgagtttgacgaggaaaaataccagctcattatcgacaaactcactaaagaagtgcattga

SEQ ID NO: 14196 - RNA, 1488 nt, synthetic construct
  source 1..1488: mol_type = other RNA
atgactatctctataaattttaggctgctgttgtgggctaccagtataattcagcccgccaatgccaacgagatcctgagctacctcaaactagtgcttaaggacgacgacgctttgcccgatgaggcatccattaagaaatacctgaaggaattaagagagattggatacctggagctcaccagcgtcaaaggagaactgtattccattactccgattggcgacgagaagctgactgccaatctgagacagctgagagataaactacggattttcatgcttgataagtgctacaagtactcgaaactgatgttacttgcctccaccgacacgaagaacatggggggagattctccctccctgcagttacgtcatgacctgaaagaagtccctcatcctgggctgtcttgggcctcaggcactctgcctagccgaccacgccaagcttgggttcgaatatttgaacagctccagattggttctatgagctcttctcaggcgtccaatcttaaggacgatagccagaatcctccttccagcttcagttttacccctgccccgactttctacagctataagagtctgaacaatcccctgttcgaggagaatggggtactgaccatagcatcttgcctcggattgacgcccagactcatcagctctatgatcaaaaaccaggagaagtactatcgcgagtttgacctctctaaaaaaagtggtggcatcaggaagatcagcgcaccacgcaaatttatgaaggtgacacagtactggctgaatgactacctgcttaataggctcaaggtgcactcagcatgttttagctaccgcaaaggcgtgtcaatccatgataacgcactccaacacgtggataaaaaatttgtggccaacattgatatcgagaactatttcggaagtatcaacaagactatgatcaagtcctgcctgcttcggaataatttttccgagcacctggtgaacacaattgctggtttgaccactctatatgggacactaccacaaggcgcgccaacaagtccaaatatttcgaatgctatactctacgagttcgaccaaacaatggctaatcaggcgatggtccgcaagtgtgtatatacaaggtattccgacgatatcaccatctcaggagatagcaaaagcgccgttaaggaattaatcaacctggcacgtctcaagatctcatccctcggcttcaaccttaacgaccacaaattccggctgttatcatataacaatcggcagcttgttacaggcgtgttgatcaacggggctctgaggcccccaaggaaatatcgaagaaaggtccgggccattttcgacaaagccttgaagaccaacgataccagtctgctgaccataaatacgttgaagggccacttcaactatctctcaacctttaaagaatacgggtttaagttcgaagaagaaaagtacttgtccatcattaactatctccagaagaagtga

SEQ ID NO: 14197 - RNA, 1434 nt, synthetic construct
  source 1..1434: mol_type = other RNA
atggctaacctggtcaatttaaagacctatctgtgggccttggcaactattcagcctgcctcaccccaggaagctcacgctttcctgaaaattgtcaccaatattgagccagacatttacacagaggaggacctcaacgatgcaataaatcggtccatgaaactggagctgattgaatgtgtgtccaagaagcacaacatttatacgctgactattaagggcggagacttcctcggaaagaaactacgactcctacgcgataaaaatcggctgtttttgctgaaaaccgtgaaggatgcgtcactcaaaatcaaggatagcccggagcaaaacaaagctagtgtaagctcagctacaatgtttaggagtaccgtgaaagtagccccttggccagaaaactctctggtcagcggtccgttgccccagaaccagagagttttttggccccgtgtgtctgaacagctgagaatcggatccaatgcgggcgggtcattcctcaatctgaactactactctaagaacaagctccctaacataaacgacgacttcagcgccgtcgatcttttcagcgaactgattgggatttcgcccaggctgttatcttccttcatcaaagcccctagtaggcactataggacgtttaccctgcagaaaaagagtggccgaggtcacaggacaataaattccccacgcgttttcatcaaaactgtgcagtattggatatgtgactatttcttgtacaagctcaatcagcatgagctttgctttagctttaggaagaacctgagcatcaaagacaatgcccgaatacacctggggtcccgctacatcctgtgccttgacatcgactccttcttcgacaacatcaagacagaacatgtgcattcgtgtctgattgagaatgggttctcagaggatattagcagttttatcagccgggtggttactttagatggctgccttcctcaaggggctcccactagccctatcatctctaacagttacttgtacaactttgacaaggtgatctctgatttttgcggtcagaatggaatgacatattcaagatacgccgatgacttaaccataggcagtacggattacactcagctcaaatcctgtattcccttgatcagcaagcaactggcaaagtttgaacttaaaattaacgagcgcaagaccagaatcatatccaataataacgcccaaattgttacaggcgtgtgcatcaataacgagagactacggccatctcgtaaattcaagaaagaagtccgggccgcatttaacaatgccaagcttaacaacgataagtcttcgcttccacgcctctatggctacctcaattacctgtcctctttcgataatggagacaccccacataatatctccgagtataagagcatcattgactcaatcaaaaaggcattgtga

SEQ ID NO: 14198 - RNA, 1434 nt, synthetic construct
  source 1..1434: mol_type = other RNA
atggcaagtctggttaatctcaaaacttatctttggagccttgctactatccaacccgcctcacccgaggaagctcacgccttcttgaaacttgtgacaaaggtcgagagcgatatctacacttgtgaggatctcaacgaggcaattctaagggcaatcaagctgaacttaatagaatgcgtgagcaagaagcataacctctactctctaacggttaaaggcggagactttctgggcaaaacactgaggttgctccgtgataagaatcggttgttcctgctgaaaagcgtgcgagacgccaacttaaaaattaaagaatcccccgagcaaaacatggtcagcgcttcttccaccatcacctttcgttctactctgaaagtagctccatggcctgaaaactcactcgtgtcaggccccttaccgcagaaccagcgggtattctggccccgggtgtctgaacaactaaagatcggcagcaacagtggtgacagcttcctgaaacttaattactactctaagaaccgcctgcctgagatcaatgaaaatttttcccctgtggatctactgtctgagctcatcggaatatcaccgagattattgagctcttttattaaggcacctagtaatcactatcgcaccttcactatcgaaaagaaatccggacgagggcatcggaagattagttcccccagggtgtttatcaaaaccgttcagtattggatttacgactactttttgtacaagctgaatcagcatgagtgctgttttagcttcagaaagaacctcagtattaaggataatgccaaagtccacctgggcaagaagtacattctgtgtttggacatagactcttttttcgacaatatcaagaccgcagacgtcaacagctgcctgattagaaatggcattccatccgacattagtagtatcatctcaggaatagtgactctgaacgggtcactccctcagggtgccccaacaagcccaattatctccaatgcttatctgtatgagttcgatcagaagatgtatgaattttgcgttaggaacgggatgacatactcacgctatgctgatgatctcaccatcgggagtaccgattatacgcaactgaaatcttgcataatctttatttccgagcagcttacaaagctggagctcacaataaacgagcgcaagacccggattatttcaaataacaatgcccaggtcatcaccggtgtgtgtatcaataatgagcagctgcgcccatcgaggaaattcagaaaggaagtgcgagcggccttccacaacgcgaagcttaacaatgacaaaggctccctgccaagactgtacggataccttaactatttgagctccttcgactccggggatacacctcacaacatatctgaatacaagtcgatcattgacaggatcaaaaaagccctctga

SEQ ID NO: 14199 - RNA, 1452 nt, synthetic construct
  source 1..1452: mol_type = other RNA
atggctaatctcgtgaatctgaaaacatatctctgggccttagggacaattcagccagcctctgctaacgaagcacatcaatttatcaagctgatgaccaacgtgacctcagatgtttattccgagtccgacctggatgacgctattaaaaggagcctcagcttgggatatattgagaatgttagcaagaagaacgagctttacattttaacggcaaaggggggagaatttcttgggaagaatcttcgactgctccgggataagaaccgcctattcctgctgaaaagcatccggagtgccaccttccagtcgaaagactccccggagcaagacgtggctggtgtcagtccccctaaggtattcagaagcagtctcaaggccgctccttggccagagaattccctttcacccggtgcactgccgcaaacacagagggttttttggccacgggtgagcgagcagctgcagattggatcaatctccggcgaatctttgccctccattaagctcaatttctactcaaagaacaagctttcagatatcaacgacaatacaactgcaatcgatgccttaagtgaatctatcggcatctctccacgactactgtcctctttcattaaagctccttcaagccattaccgcactttctcgctgcagaaaaaatcatcaagtggcacccggatcataaactctcctagggccttcatcaaaactgtccagtactggctgcacgattactttctttttcgcttgaagctgcacgactgctgcttcagctttcgtcaaaaagtgtccatcaaagataacgcaaaggtacacctcaactccaattttatcttgtgtttggatatcgaatccttctttgacaatatcacgacagagaacgtctatagctgccttgtgcgaaataagattgacgaaaacattgcaagcgttatagcggggattacgacactcgataactccctgcctcagggtgcgccaacctctcctattatctctaacgcctacctgtacgactttgatcagtctatgctagagttgtgtgccaagaataaaatgacttattccaggtatgctgacgacctgacctttggcagcaatgactatatgagtctgaaggatctgatccccactatcgccgagtctctccggagttatagactccgcataaacaagaagaagaccagaatcatatcgagcaataattcacaagtcataaccggggtgagtattaacaatggcgtgctgaggccctctagaaaactacgtaaagagattagagtcgcgttctatcaggccaaaactaacaagaacgtggacgccctgcccaaattgtacggatacattaattacctcaagagcttcgaggacggagacacagattacaacttagaactgtaccagggcaccatagatgaactgaagggcatcaccaaacagagccgctga

SEQ ID NO: 14200 - RNA, 1482 nt, synthetic construct
  source 1..1482: mol_type = other RNA
atgctcggggaaaatagtatgagttccgagttgaacctgaaggcctttatatggggtctgggagtgattcagcccgccactccagaagaagtccagaattttatcctccaggttttgctgaaacagtcaaacaaagagtttgacatgcagatcaccgctcagaagttgctggacgaggactatatccgatgcgtcagcaaaaagaacaagctgtactctatcacacatgagggtgacgagtttttagggaataagctcagagctctgaaggataaagagcgattgtatctcctgaaaagtactcgcgacgtgaatttctcagggaaaggcgcgagcgagaggaatagcggtggagcctcccctttgaaacaggcctcctctagtacaaaggtgagtcctaggcccgaaataagccttagccctggcccccaaccccagattcaacgcaacctttggcctcgtgtttacttgcaacttaatattggaagcaagcctgaagcacccctcaactctataaatctgaatttctactcagcaaactccataccatccaaatttgataacttagaccatgccattctcaccacttccgagcttatcggggtcagctcttacctgcttaaagatttctgctcaaacacccaaaagtattacagatactttgagatccccaagaagtccgggaaaggggtgcgcgtgatttgtgcaccacgtgcctttttaaagaccgttcagtactggattctggactacttcctgctgagactgaagcagcacgagagttgctactcatataggaagaacaagtcaataaaggacaatgccaatgcccacattaataagaaattcatcctgtgcatggacatcgagtcttttttcgataacatttctatcaagcaggtcgtgcaatgttttactgaaaactctatatcgccgcacctcgctatcttgttcgctaaactcgtcacgcttaacggatccctgccacagggtgccccaacaagccccatcatcagcaatagtcacttatacgaattcgatgattacatctccaaatattgtgcagagaattccctctcatatagccggtatgcggacgacctgacgattggcagcgatgattatgatgctctaaagaagatggaaaaactgatcacagaggagctcggctctttcggcctaatcattaacaagggcaagaccaggatcataagcttcaattcttgtcagattgtaactggcgtggcaatcaataacggggaactaagacctacccggaaacacagaaaggaagtacgagctcttttccatcgggcggaaatcgaacggtctgtggagttactgccgaaactctatggacatctaaattacctgaaatcgtttcgcaacggcgactcaccaaaaaacatccagaagtatcagtccattattgatcggctgaagctgctgaggaacattgagggcttcggaagcgagacatga

SEQ ID NO: 14201 - RNA, 1452 nt, synthetic construct
  source 1..1452: mol_type = other RNA
atgtcttcggagcttaatctgaaaacctttatctgggctctgggagtcattcagcccgcaactcctaacgaagtgcaaaatttcattacccacatgcttctcaaacagagtaacaaggagttcgatattgagacaactgtgaaaaagttgatcaacgaatgtctgattcggtgcgtgtccaagaggaacaagctgtattccatcactcacgaaggagatgaatttctgggtaataaacttagagcactcaaagacaaggagagactctatctcttaaagtctgtacgagatgtcacctttgtcggtaagggggcctcagaaagaaacaccggcggagcatctcccttgaagcaggcgcggagttccaccaaggtttcacccagacccgagatccccctaccttccgggcctttaccacaaaatcaacgcaatttttggccgcgggtatactggcagctgaatattgggtccaaaccagaggccccactcacctccacacacctcaatttttactctgctaacagcataccgcgtaaattcgacagcatggccgacgcaatcatcaaaattagcgagctggtgggtgtgagctcctatttactcaaggacttctgtaacaacacagagaaatactatagagacttcgagatcccaaagaaatcagggaaaggcgttagggtgatctgcgcgcctcgagccttcctgaagacggtccagtattggatcctggactatttcttaatccgcctgaaggagcatgagagctgttacagctacaggaaaaacaagtccataaaagataacgccagcgtccaccttaacaggaagtttatactgtgcatggacatagagagttttttcgataacataagcgttaagcaggtggctaagtgcttcgtggagaacaaaattgagccccatctggccgccctgttcgcaaatatcgtgaccttcaatggcactttgccacaaggagctcctacatccccggttatctcaaacagtcacctgtacgaatttgacgaactgatctccaaatattgtgtcgacaacaatctgtcttactcacggtacgccgatgatcttactatagggtctgatgactacgattcattgaagaaggtggaaacactgatttctgagaaactaagctcttataccctcaagctgaataaaaagaagacacgtatcgtatcaagcaatagttgccagatcgtgacgggcgtggccattaataatggagaactccgcccttcgcgcaaacataggaaagctgttcgggctctattccataaggcggaagtggagaaaagtgttgaacttctgccaaaattgtacggccatttgaattacctcaagtcctttaacaatggcgatactcccaagaacattcagaagtatcagagcatcattgacaagctgaacaatcacaagaacattggcagtttttga

SEQ ID NO: 14202 - RNA, 1455 nt, synthetic construct
  source 1..1455: mol_type = other RNA
atgattgatgtgatgaatagcaaggtattcgtgtgggccctaggcgtcattcagcctgcaaaaccagaggaagtacttgactacctcttgaaggtgtttgccagcgagaaacagaaggatttcaaggtagaaatcggtcccacattatcaatcgtccttgaacagggattagtccactgcgtatccaagaagaataatctctactccgtgaaacatgctggtgatgatttcttaggcaataagcttagagtgcttaaagataaggagaggctgtatctgctgaaaagtatgcgggacgttaacttcttgtcaaagggagctagtgagcgaaatatgggcggagtttccccacccggacggttgaggtctagcactaaagtgtctccacgcccagaggtccccttaagtctgggaccgttgccgcagaaccagcgtaacttttggcctcgagtgtaccagcaactggggatcgggtccaaaaccgaagctcctctccagcctataaacctcaacttttattcggttaacaccctgccagaaattaaatcaaggagcgaggctatttttgctgcttccgagctgattggcgtttcttcttatctgctgcgggacttctgtaatagtaaggagaaatactacaggaagtttgaaatcgccaaaaaatcctccaacgagagcagagtgatcaatgcacccagagtgttcatcaaaaccacccaatactggatacaggactatttcttttaccgcctcaggcaacatgattcatgtttttcataccgcaaaaaagtgtctatcaagaacaacgcctcagtgcacctgaacaaaaagtttatcctctgtctggacatagagagtttcttcgataacataaccaaaatgcaggtcatcagctgtattgcgaagtctaaggtcaatgtgcatctggcggagctttttgcagacattgtgacattgaacggctgcctgccacaaggcgcacctacgtctcctattattagtaacagccacctctatgaattcgatgagaagatctttgagtattgctccagcgccggtatgtcctacagtcgatacgccgacgatctgacaatcggggccaacaaatatgattcattgaagacgctagaaaaggtcgtgaagaccgagctggagactctggggctgagcattaatagaaagaagactcggattatctcctctaatagctgccaggttattaccggtcttgcaataaataatggcgaaatccgtcccactcgcaaatatagaaaggagatacgggccctcttttacaaggccgacgacgcgatcgacatcgaactactgcccaaactgtgcgggcacctcaactacattaaaagcttcaaaaatggggacacaaagaagaacatcgaaaagtatcagctgatcatcgacaagctcaaaaagtcgaagaatattcagacattctga

SEQ ID NO: 14203 - RNA, 1440 nt, synthetic construct
  source 1..1440: mol_type = other RNA
atggaatccactataaatctgaaagcctacctgtgggccctcggagtgatccagccagctaaccccgaagaagtccatgacttcctgaaattcatgaacaacaacaccaatgacatctactcttcttccgacatcgatgacgccgttgcattcagcctggagcacaaacttatcgagatcgtgtccaaaaaaaacaatctgttcgtcctgagccttaacggctccgaatttttaggcaagaaacttaagctcctccgggacaaaaatagactactgctactgaagtcgctccgaaacgactcactggaccgggaggaatcccccgagcagaagatggatggcgttccaccaagctcaatgtttcgcctgtccctcaaggatgcccctagacctgaggagtctctcagcagtgggcctctgcctcagagccagagattcttttggcctcgcgtgagcgaacagctgcagattgggagtaacagtggcgactcatctacgcgaatacggttgaactattacagtcgtaataagataccagctaacactgagcaatccgcatatgaatgtttggcagagctgatcggcgtcagcccgcgcttactttcctcaatggccaagtctcccaaaaaacattataggactttcaccatggccaaaaagagcgggggcacaaggcttattagtgcccccagggcttttattaagaccatccagtattggattacggattattttctgtatcgtctgaaaacacacgaaagatgcttctcctataaaaagggtctatccatcaaagataacgctaggctgcatttgaataagaaatacatcttatgcctggatatcgaatcgttctttgacaacattaaccagaaggatgtgattaacctcttgataaactcaggaatagaaaacaagctctctattgctatgagttttttgctgaccctcaataatacattaccacagggagcaccctcatccccgcttatcagcaatgcccacctcttcgacttcgataagaagatcactgaaatcgctaacaatagtaatgtgacctacactcggtacgcggatgacctgacatttagctgtgaccaaaaaagcactcttgagaagattaaggtgattgttaacgagaagttaaacgagattgggctaaacattaagaatgataagacaaggatcctctctgagcacaattcacaaattattacaggtatcgccgtcaacaataataatctgcgcccctcgagaaagttccgaaagaaagtacgggtgctgttttaccaagcgaagatcaataatgatgtatctcagatcccaaccttgagggggtacttgacctacctgaaatcttttgagaatggagacacccctgagaactataagagctacgagggtaccataaattacctgcagaagatccagaaagcatga

SEQ ID NO: 14204 - RNA, 1464 nt, synthetic construct
  source 1..1464: mol_type = other RNA
atgatggcgagtccaatgaattccgcaataaacatcaaagcctatctctgggctctgggggttatacaacccgctacgcccgaggagattcacaactttctaaagttcatcaaccgctctgaagaggagatttacgacgccgataccataagcgatactataaagtattccatcgataacggtctgatagaaacagtgtctaagaagaatgagctttacgtgctgagtctggtgggcggagaatttctaggcaaaaagctgcgtctgttacgggataagaatcgcctcctcctcctgaaatccctgaggaacgactcattcaagaaagaggggtttcccgtccaggaaatggtgggcgttagccccagtgaaacccaaaggctgtcactgaaggccgcacctcgccctgaggaatccttgtcgcccggaccgctcccacagaatcagagattcttctggccacgggtttcagaacagctcaagattggtagtacatctgggaatcctagtcctagcattaggctgaactattatagtcggaacaaaatcagcaacaatagcaatgtgactactatcgactccttggccgagttaattggcatctcaccacgcctgctgtcaagcattgtgaaaagtcctgagcaacattaccgcgccttttctatgcagaaaaagtcgggaggtctgagaagcataaacgccccccgagcgtttctgaaaaccatacagtactggatcaacgactacttcctttataggttgaagattcattctaactgcatcagctaccgaaaaaaggtcagtattcgggacaatgccgccatccatctgaacaaggactacgtactctgtatggatatcgactccttttttgacaacattaagacgaatggagtatatactctgcttgtcaattccgggattgacgagtctctttccagaaccatcagcttcttgaccacattaaataataagctgccccagggagctccatcttcccctctgatttcaaatgcttacctctacgattttgacagcaaaattcacgacctctgcagcaagatgggcatctgttactctagatatagcgatgatctaacattctctggcgataataaggagaagcttgaagccctggtgccggaaattattgagcaattggactgcttcaacttgaagatcaaaaagtcgaaaacccggatccgatcccggaattcaaaccagatgattaccgggatctcaatcaataatggcattttgaggccatctagaaaattcagaaaaaagatcagggcggcattcttcaaagcacgttctaacaataacatcggcgctatctccacactgaccggatatcttaactacttaaagagctttgaagcaggggatactgaatacaacatcagcgagtatcagaaaacaatcgagcaccttaaagctctcaagaactccataaaaacttga

SEQ ID NO: 14205 - RNA, 1449 nt, synthetic construct
  source 1..1449: mol_type = other RNA
atggagaacatcattaatgtgaaagcctacctatgggctcttggcgtggtgcagcctgcctctcccactgaagtgcacgacttccttaaatatattaaccgctcagaaaaggagatatacgatgagtcgtctatcaaggaagtgattgagtatgctctcaacaatcactttatcgagaaggttagcaagaagaacaacctgtttatattgagttcatacggagcagagtttctgggaaagagactgcgattgctgcgtgataagaatcggctcctgttactcaaagcgctgcggaacgacatcctcaagaaagagggactattcgaacagaacctggacggcgacagtcccagcccaatgtttcggtccacctcaaaggtagcaccaaggccggaggaaagcctttcaccagggcctttgcctcagaatcagagattcttctggccacgcgtgtcagagcagctcaagatcggtagcttttccgagggcccatcaaattttcaccccatcaatctgaactactatagcaagaataagctggacagcgcctcaaatctgagtccggtgaacgtgctttcagaattgataggcatttcccctaggctcatctcgtccatggttaaaagccaagataaacattatcgtacgttctccatgcccaaaaaatccggcgggtacaggaagattaactctcctcgggccttcctcaaaaccgttcagtactggataggggattactttctttatcgcttggtcaatcatgaaaactgcttctcttataagaagggagtatccgtgaaagataatgcgtcggttcatctgggcaagaaatacattttgtgcatggacattgattcctatttcgattgtatcaacgtacactcagtattcaaactcttcgtcagatccggaatcgacgaaggcctgagtgacctaatgtccaaactggtcacactgaacgggacactcccccaaggatctcccgtctctccattaattagcaactcctacctctatgattttgacgtgttcatttctgacttttgttccagctacaatatcacctacagccgatatagtgatgatctgacgtttggtggagacgataagagcgacttggaagccatcattggtatagtcaagaaaagcttaagtgagttcaacctgaacattaaagacaataagaccagactgctgtctgaaaataatactcagatcgttaccggggtggctatcaacaatggtgtgcttagaccttctaggaggtttcgcaagacagtgcgggctatcttccacaacgcattagtcactgaatctgtgggcagtatcctgatgctatccgggtacctgcattatcttaaaagttttgagtctggcgagacaccccacaatataaaggcctatgaggacatcattgagaaactgaagagcaagtacgtcagcgtttga

SEQ ID NO: 14206 - RNA, 1452 nt, synthetic construct
  source 1..1452: mol_type = other RNA
atggatgagaacttcaacccccgacctttcttgtgggccatcggaatggcccaaccgaccaccctggactatgcccatgctttcctgaagaaggtgacacagtcagagtcagacctgctcactattgaagagatcaacaacttctccaagtttgcactcgacgctggactcattgaggtagtgagcaagaagaataagctgtattcgttaacgaacgagggcggcgttttcattggaaaggggcttagacttctacgagataaaaatcggctgcttttgttgaagtctttccgaagagctaaactaacacaggagtcatcaccaactggaaacctggcgggtgctgccccagtcgtgaggaatagctccgcattaaaggccgctccacgtcccgaagtgagccttgccagtgggcctctgccgcagaatcagcggaacttctggccccgcgtctctgagcaattcaacatcggactgatagtgggcgaactgagtcctagtattaacctgaatttttactctcgcaattccttccctgaagtgtccgactccatttctgccatcgatgccttaagtctctgtattggtgtcagcccacggttgattgggagcatgtgtcatgcgcagtctaaccactacaggacttttaccttgatgaaaaagagtggaggcaccagaacgatcaatagcccacgggcatttctgaaaaccgtgcagtactggatcaaggattacctcatctacaaactgcccgtgcacgatgcatgcttttcttatcgtaaagggctgtcagtaaaaaataatgcatgcgtgcacctcaacaagaagtacattctttgcgttgacattgacaactattttggcagcattaaaactgagtttatccacgctatgttgcacaaattcgatttcagtatggaactctcagaggttttatcccagcttatgactctggacggatccctcccccaaggtgccccaacttctcctgacattagtaatagctttctctacgactttgacgttaccgtgtctgattggtgctcagcccataacgtaagctattcccgctactccgatgacctgacattcggtctagattccatagatatcataggcgatctgaaagacttcgttataaacagcctgctgaggctggggctcagactgaaagaggagaagaccagagtcatgtcttgtaataatcgccagatgattacaggggtcgtgataaataatggcacacccaggcctagccggaaatttaggaaaatggtgcgcgcggccttttttaatgcacaggacttgggcgatgtcagttccatcaagaagttaaggggttaccttaactatctgtccagcttcgagggcggggacacaagcgaaaacatcgctaagtattcaaagatcatctcttcgctcgaagaaatcaagatcaaaatgaccaactga

SEQ ID NO: 14207 - RNA, 1461 nt, synthetic construct
  source 1..1461: mol_type = other RNA
atggcattgactatcaataaggacataatcgtgtgggggctttcagtcattcaaccagcatcgatttccgaactccggggcttcctgtgcgcagtgacacaggacgaaaacgtagtgcctgatggagattaccttgccgtaaccgtgaaggaactgattctgatccacaacgttttgaaagtcgccacgaagcctgctcgatattctgtcacccataaaggagggatccgcctcacaaaaaagctgcggtacttgagggaccgcatgcgactttttctccttaaggactctgcctatggaaggtttcaccttagctcagatgtcttagatcagaatctggatgacgcctcttcaagcagctctatcgggttaaaatatcaggatgcacagagatccaacagctttctcgctgccgatcagaaagcgatctggcccctagtgtccgagcaattccagattggctctacctctgcttcagatgacaaaaatacccctacttatgccgatctggactgctacagcttcgatagcgcgtatttcgaaggatccctaaagaacacatcagatctgagtgaggcaatcggagtgtctattcgcttgataacatccatatgcaagaagaaggagaagcactaccgcagttttgaaattcccaaaaaaagaggcggcaccagaccaattgatagtcctagaacattcctaaaggtcattcagaaatggatcaacgattatttcatctacgacctaaagcagagcaattactgttacagctacaagaaaggtgtgtccataaagtctcacgcgcagtgccatgagaagcagaattatgtggcttgtgttgacatcgaagacttctacggctccctgacaaaggatcacatctataacctgctgctcaaaaacaataaggctcattccatcgccaaggtggtttcagacctttgtacctttaataataagctcccacaaggcgccccgacgagcccaatactgagcaacgccttcctgtatgacctcgacaattacctggtgtcagagtgcgagggtctgaatgttacctatagccggtttgctgacgatattactattagtagcgacagtaaagagaatttgattcgactgatttccatgatcaaaaactgtttacgttccctgggcctgtctctgaaggactcgaaaactcggatcttgcataaaagtcagaaacaattggtgactgggctggtcgtgaacgagatcgctaagcccgccaggacttacagaaggcgtatccgggccatttttcacaaggcaaagctttaccccgactcattcaagggtaaagagaaagtactgcaagggtacttatcttacctctcttcgtataactgtctctccagcgacacgcagagtgactacaagcagacaatactgaacatcaagaatctcaccagttcaagcaacagggataaaaactcctga

SEQ ID NO: 14208 - RNA, 1428 nt, synthetic construct
  source 1..1428: mol_type = other RNA
atgacagtgtcgattcgcagagatatcttgacttgggccgtggcagtgatccaacctgccaccatttccgacatctataacttcctgactacagttcttaaggacaaagatgctattccgagtcgggatgctattatgatcgaagtgctggccttaatcgagttgaatgacattgctcgagtgtcccaaaagccaacaaggtattctatcacagccaaggggaacaaccggctgaataaacggctgcggcacctacgtgatagaatgcgtcttttcctcttaaaaaatgcttacaggggcagtctgaaaaagcccagtgctatatttgatgaggaaacgaacgacgtgtcttccttcatcagaaaggccgtggagattaaagatgcacagaggcctaattcttctttggtagccgaccaaactgccgtctggtctttggtgagcgagcagttttctataggtcctaatgaggtcgcggacggcgttctgctgattccaacattctactcatttgatgcgaattactttgatggagaactgaggagcatagtcgacctgtcagaggcaattggtataagtatccgcctcataaccagcattgtgaagaacaagcagaaacattataggacctttaccgtcattaaaaagagtgggggagagcgggtcattgatgcaccaaggacctttctgaaagtgatccagcgatggctgagcgattttctgctggacaaactgcccgtgcacgacttttgcttcagctacaagaagggacagagcatacgaaacaatgcgcagattcatgttggcaagaagttcgtgctcaacatcgacatcaaggatttcttcggttcaatcactaagaagatgatctgcattaccctcatcgagtcagggttcgaacataaactcgccaagattgtatccgagctctgcacttacaatgatagacttccacaaggcgctcccagctcccctatcctgtcaaactctatcctttacaagatggactgctttttaactgaacagggagcactcttcgattacaactatagccgatatgccgacgacattacgatctcaagcaatgatagattgactatggagctaggcagggagacaatctttcggtgtctgaatgaatcggggttcgacatcaacggaggtaaaacccgcgtggctgcaaccaacagccgtcagatcgtcacagggcttgtagttaacaaacgggtccagcccacaagagtttatcgccgcaaggtaagggccatgtttgactacgccaaaaagaatccggactccttcaccgacaaatattctatgctgaccggatgtttctactacctcatgtcctttggctgtattggccactccaagataaacgaatataaaaatacgctctccctattgcgcgaaatcagtaagagatga

SEQ ID NO: 14209 - RNA, 1497 nt, synthetic construct
  source 1..1497: mol_type = other RNA
atgagtgtctttatcaacactcgcctcatcaggctgggcctggggtgcattcaacccgcttctgccgaggatgtgagcaaattcctggcccagacgctcggaacagagggtgctcccatcccccctgaaagtatccaatctattttcgatgactgggcgtcccaacaggatgtagtttgtgtgcaccagcgccagcatctgtattctcttacaagaaaaggtgacaacgcactcgatctgcgagagcgacgtctacgggataaaacacgcttattccttatcaaggaactgcgggccgctactctgaagaggcctgaggctgaggaaccggaaaaggccgacgactcctccgccgtggccattgattcagcaacccagggggagaggcctaaaggggctgctgctaatccaagagctgcgccgggagttggacgggctttttggccactgctgagcaaacagctgtttgtgggatcttcaccccaggcctctggactccgtttccgatttttttcctttccctcgattcttgactgttgtaaggccgctgggggcaccagcataccagaggacggcgtgggagtgaacgagatttctttggccttgggcatttccccatcgctccttaagtccttcctcgcgaggcccgagcaccactacagagtattcgaaataccaaaagcaaatgggaagatgagacagattaatgccccacggaccatgctcaaggttttgcagtacttttttgtggattacctgctggacaggcttgctgtgcacccagctgccaccgcatactggagggggagctctgtcaggaagaatgcggagaggcatgcccgccagagatacgtcgccaacatagacgtgacaaattttttcccgagcctctcaactggcttcgtcattcgcagcttatgcgccgccggtctgaaacctgacaccgcagccttggtggctcgcctgtcatcatacaaaggcgggctacctcaaggagcccccacctctgcagcactttccaacatcgtgatgtatgggtttgacaaaaagttaagcgaagcctgcgcaagcttgggcgtgaactatactcgctatgcggatgatatgactttcagcggcctggagctgggtgcaatccaacagagtatcaaactagcaaacgaatcattagccgagatcagactcaagataaatgacgaaaagacccggatctacgggcccagtacaagacaggtcgtcacaggagtggtagtgaatgattggcctcagcctagtcgggtcgagcgaagaaggctgcgtgccgaactgcaccatgcaaagttgagtcccgccacgttcgttgccaagtaccagcagctgcaaggccgggctgcctatgttcttagctatgctggcgaagagcggcctgttggcgcactctccagaggctatgtagaagaggcattgttcgacgtgcgacggctgcatcgcctgatgtcccagaccggaggtgcgtga

SEQ ID NO: 14210 - RNA, 1488 nt, synthetic construct
  source 1..1488: mol_type = other RNA
atgtcagtgaatgtaaacacccgcctcattaggctagggctcggctgtatccagcctgcatccgccgacgacgtttctaaattcctggccctcagcctggaggtagaagaggaacctatatcccctgaggccatccagataatcctggatgagtggtccagtcagaaggatgtggtttgcgtgcacctccgccaaagactgtacagcttaacccggcagggcgacggaagacttacacctaaggagcgacacctacgagacaaaactcggctcttcttgcttaaggaactgagggctgcaactttacggcgcccagaggccgaagagccggagaaagccgatgtaagcagtgcggttttcattgacagcgccacccaagaagaaagaccgaaaggagcggccgctaaccccagggttgctcctggtgcaggaagagctttttggcccctgcttgcgaagcagctctttgtgggatccagtccatcggcgagcgggttgagattccggttttgctcctttccaacgatatccgactgctgtaaggccgctggcgacgattctattcctgccgatggcataggcattaacgagatctcattgggtctgggaatttccccgggtctgctcacgtcattcttggctcgccccgagaggtactatcgagtctttgagatcccaaaggcaaatgggaaatctcggcagattcaggcaccccgcacaatgatcaaagtcctgcagtacttcttcctggactatctgctgaattggcttgaggcacatcccaccgccacagcctatagccggggaagttcaattcgcaaaaacgcccaagtgcataccgaaaagaaatacgtcgccaacattgacgtgtctaatttctttccctctctaactatcggcatcgttgctaagtccctcgtggctgctggtttgtctagtaatacagctgtgctcgtcgcccggctgagttcttataagggcgggttacctcagggagcacctacctccgcagctctttcaaatatcgtgatgagggaatttgacgccagcgtgtcggaatcatgtaatagcttgggggtcagctataccaggtacgcggatgatatgacattttctggaatggagctggacggggtgaaacaagcaatctgctttgcaaaggagaggctgactgagatgagactcaccctgaacgatcagaaaacgcgtattttcggcccagggactaggcaagtcgtcactggggtggtggtgaacgattggccacagcccagccgagtggatcggcgtagacttcgtgcagaactgcatcaggccaagatcagcccagctaattccgtcgccaagtaccagcagctattaggccgagctgcttacatgctgtcatatgcccgcgaagagaggcccgtaggcgcaatcagtagagcctacgtggaagacgccctggccggtgttaagatgctgagacacttcacacacaacgagtga

SEQ ID NO: 14211 - RNA, 1551 nt, synthetic construct
  source 1..1551: mol_type = other RNA
atgagcgtgggagtgaaccagagcttcgtgcgactggccctcggatgcatccaacccgcctctgctgaacagatcgcagccttcatctctagtagtcttcctaccggggcgcaccctttgcatgctgagaaaattcgggaagtgctggatggctgggcgtccagcggagacatcctatgcgtccataagaggtatttactctacagtcttactagacagggggatgggaagctgtcggcacccgaacgcaaggtgagagacagaaccaggatgtttctattaaaagatcttagaagcgcctccctcagagccagcgaagtttggggaatcgagcaagccgatgactcctctgctgtatcacacggtatggcagtgcaggaggacgaaaggcctataggcgcagctgtttcaccgagaaggcgtgacgggcgagcctattggccactgctgagtaagcagttgctggtggggtcttcgtccccatcatccgacacccggtttagattcttgtcgttttcttccgtcaggagttgttcccaggcctgcgggtatgccgatatccccgaggggggcattgggctgaacgagataagcctggcccttggagtgtctccccgcatcgttggtctgctcctccgcagacccgaatcacactaccgggtatttcagattccaaaggccggaggcggcctccgggaaatacatgcaccgcgtacattcatgaaggtcactcaacactttatcctggactatctactccggcggctgaaagtccatccagccgctactgcatactccattggttgcagcatcaggcacaatgctgagatccacgtcaggcgcaggtacgttgctaacattgacgtcacaaacttcttcggctcactttctacctctgtggtttacgatcgcctgattgcggtcggcctcatgaaaaacacagccgccttcatcgcacgtatttcatcatttatgggcggcttaccccaaggagctcctacaagcgccgccctaagtaatatctgtctgtacgctgcagatgatgtcctgcaggccgaaagtacggtaaggcaggtgacttatagcaggtatgccgatgacattacgttcagcggcgacgatttgggcgcagtgcaggcttgtatggccattgccagaagagagctgagcgcgctgggactgacattgaatactgataaaacacgcgtgttcggtccatctagtcgacaggtggtgaccggagtggtcgtgaacgaacatgctcaaccggctcgaaaggagcgccgtcgactgcgagcgatgctgcaccacgcaggtaccgctcccgacgagtttgttgcccagtttgacatactccaggggaaatcctcatatatgttaagctactccacccctgagcgcggaattggcgcccttccagaaaagtacgtggaggacgctttggctgccgtacgggcagctcggaagaaaggtctgcctgccgcagatgagtcttctctctcctccgcgcctttcgacaatgagaatcggggccgcgacgcaatcagctga

SEQ ID NO: 14212 - RNA, 1473 nt, synthetic construct
  source 1..1473: mol_type = other RNA
atgaccgttagagtgtatcctcagttaatccgactggccttagcgactattcagcctgcctcggctgagactgtggtgagatttgtacagagtgccctcgactctcaggagcagttactcgatctgagcgaagtacaaaaactcatcgaaaactgggaagagttagccgatgtcgtgtgcgtgcataagaggtaccagctctactccttgaccaaaagaggagcaaacaagctgagcaaaaccgagaggcagctgagagataaaacccgtctgtttctgctcaaagaactgtgcgtgagcaagcttaagagccccgaggtccaagagactgagaaagctgacgccagtagcgccgtagttattgaacccgtgcttcaggaggacaaacgcccaatttccccagcagttccgccaaggcctgctaggagtagcggacgcggctactggccactgctgtccaaacagctcttcgtgggatcttctacattgacatccggtcctcgacttcgctttctgtccttccagagtgaaaagtcttgtgttctcgcgtgtgggacgaaagattcatccgaatttggcatcggggtcaatgagatcgcactttctctgggcatctccccagggctcttaaccagtatgcagcacaaacccgaaaagcattataggaccttcgaaatccccaaatcaaacggcaagccccggctcataactgctcctcggacaatgatgaaggttgtccagtatttcttcctggactacgtactgcgcagtcttcccgtgcatacatcagcaacagcctaccagcggggctgctctatcaggcaaaatgcgctgcagcatctgagacaacgttacgtcgccaatattgatgtttcagacttttttccctctctgactaccgcagtggtgacacagaagctagtggagggcggtctgaagattaacactgcacttctggtagccaagctatgtagctatgacgacggcctacctcagggtgcccctacttccgccgcaatttccaatatcgtgttgttcgattttgataccgctatgtcagaatacgccggcttgcacggcttgacatacaccagatacgctgacgacatttcaatcagtgggagcgagaagtctgagattgagaaagccatctcggtcgcacaaaaactgttgtcaggtatagggcttaaattgaatgattccaagacccgcatattcggacccagttccagaaaggtcgtgacgggagtggtcgtgaacgaatgggcccagccgagccggaagcaaaggcgaaatctgcgggctgctctccatcaggccagcctgcacccagaacgctatgttgacaagtatcaccagctgcaagggaaggctgcctatatgctaagcttcgcgacgccagagcacagcgtcggaggactctcatctgagttcgtgcacaacgcaatagctgagattaagaagcggatctga

SEQ ID NO: 14213 - RNA, 1521 nt, synthetic construct
  source 1..1521: mol_type = other RNA
atggcaataatgataaattctcgcatcgtccgcctggccctgggttgcatacaacccgctgacgccaacgccgtgatcgcgtttctgatgaaggcctttaagtatgacaccaacctcatcagcgagtccgcaattcaggaaatcttcgaccagtggagtaccgatggtgaagtggcgtgcgttcataagaagtctaaactctactccctgacacgcctcggcgacagtcgactgaaccgggaagaacggaggctccgcgatcgcacccggttgttcctcttaaaggagttacgaagcgcaaagttgcatctgcctgaggccggtgagccggaaaaagctgatgtgtcttccgctgtcattgtagatcagcccgtccaggaggacgagcgaccaactggagccgcacgtcctcctagggtagccagaagggctgcgagagcctgttggccactgttggctaaacaactgtttgtgggctcctctagcagggccagtggacccttctttagattcctgagttttcctacagttaaggcatgcgcacaggccaacggcttagcggagattccacaggatggcatcgatatctcagagattagtctggcaataggcatttcaccacagcttattggactgttgattcacagacccgagcggcactacaggacttttgagattccgaaggcaaatggaaaggtgagggagattcagtctcctcgtaccatgatgaaggttgttcagtacttcctattagactacctgctctacaagcttcccgtccacgtatcggctaccgcatattcccgcggctgtacagtgaaggccaacgccgctccacatgtggggaagaaatacgtcgcgaatatcgatgtggaagacttcttcccatctatcaagtggcagctggtgcacaaaatgctggccctaggagggctggaggacaaaactgcctatttgattgcacggatgacgtcgtatcaggggggtcttccacaaggggcccctacttcagcgcacttgtccaacgtggtcctatatccttttgacaaagaaatgtccggcttttgtgagtccgtggatgtcaattacacacgttatgccgatgacatcaccttcagcggttcagacaaaaatgtggtctggagcgcagtggaaagagctaggcagctgcttaccgaccttgggctggagatcaacaaagaaaagacacgggttttcgggccgagctctcggcaggttgtaacgggcgtggtggtgaataaatgggcccaacccagcagagagaagcgaaggaaacttcgcgccgagctgcatcaagccaagatgaatcctgaaaaatacgctgctagagccgatgaaatccggggaatgtcagcctatatgctgagcttcgcttccgaggagagagccgtcggagggctctctaggggctacgtggaaagctcactcgctaaactcactgaatacatcaacgaaatgaaagctaaggagagcgcaatcgctccccccagtgctccctga

SEQ ID NO: 14214 - RNA, 1521 nt, synthetic construct
  source 1..1521: mol_type = other RNA
atggccattaatatcaatcagcgcatcgtcaggctggctcttggctgtattcaacccgccgacgctggcgctgtgatcaagtttttgagcaaggccttcaactacaataccggctatttcccggagggatctatacaggacatttttgacgagtgggccagtgatggcgacattattaacgttcataaacgaaccaaactctactccctgacgaggcaaggtgattctagactgaaccgggaagaacggcggctgcgcgataggactcgattattcctcctaaaagagatgcgcagcgccaagctgcatttgccagaggcaggagagccagaaaaggcggacgtgtcttcagccgtaatcgtggacccacctctgcaggaagatgaaagacctacaggagcggctcgaccacctcgtgtagctcgcagagctggacgggcttgttggccccctttaggaaaacaactgttcgttggcagcagttccagggcttcgggcccatattttaggtttctgtcctttccgaccattaaagcctgcgcccaggcaaacggcttagacgaaattcccaaagacgggatcgatattggcgagatctcattggcaatggggatctcgccccagcttataggccttctcatccacaagccagagcgccactatcggacctttgaaattcccaaagctaatgggaaggtcagagcgatccagtccccgcgcactatgatgaagatggtacagtatttcatcctggactacctcctttacaaactgcccgtgcacatatccgccacagcctatagccgcggatgcaccgtgcgagccaatgctgaggtgcatgtaaggaaaaaatacgtcgctaacatcgatgtggagaactttttcccaagtatcaagtggcagctggtgcagaaagttctcgtgatgggtggattggaagacaaaactgcctacctgatatctcggctgacatcctaccaaggtggacttcctcagggggcgcccacatcagcacacttaagtaatgtcgtcctgtacccatttgataatgagataagcaacttctgcgaaagcgtgggggtcagctacacaagatacgccgatgatattactttcagcggggacgataaggactcagtgaggtccgctgtcgagaagagcaccaagctcctgtctctgctgaagctcgagatcaacaaagataagacaaggattttcggcccctcttcccgtcaggtggttactggggtcgttgtgaacgaatgggcacagccttcacgggagaagagacgtaagctcagagccgagttgtatcaagcaaagctaaatcctggcaagtacgcaagcagagccgacgagctccagggcatgtctgcatatatgctatcattcgcgggggagaaccgacccgttggtggattgtcccagggttatgtggagtcatctctggcccggcttacggcatatatcaatgccatgaaggaacaggaaagttccaccgtgccccctagtgcaccttga

SEQ ID NO: 14215 - RNA, 1488 nt, synthetic construct
  source 1..1488: mol_type = other RNA
atggcaattatcgtgaacgttcagttggtcagactggccctcggttgtatccagccagcagacgccaattccgtctccaagttcttgggagcttctctgatcggcgatgacaacttactctccccaagcgttatccagactgtgtttgatggctggatagcagacggcgatgtcgtgtcagtgcataagaagtctcagctgtacagcctgactcgccagggcgacaaaaaattgaaccccaaagaacgcaaagtccgggaccggacacgtctgtttctgcttaagaacctgcgggcggcgaagttacatctcccagaggccggggaaagcgagaaggccgatgtttccagcgccgtgatagtggatcaacctctccaggaggacgaaaggcccactggagcggtatgcccacccagagtggctcgtcgcgctgatagagcatgctggcctctcctggccaagcagctattcgtgggttcttcaagccgcgcctcaggcccgttctttcgattcctgtcatttccgaccatcaaagcttgcgcacaggcaaacggcttggattcgattccctctgatggtatagggctgaatgagatctctctggccttgggtatttctcctcagctgataggactgctcattcacaagccagagcgccactacagaacgttccagattcctaaatccaatggtgggacaagaaatattcagagtcctcggacaatgatgaaggtggcacagtactttctgttggattatgtgctttataggtgtccagtacatgtgagtgctatggcgtattcccggggttgtaccgtccgcaacaatgccgaggtccacgtaggccgacgcttcgtcgctaatattgacgtcgagaattttttccccagcctcagcaggaaaattgtttttagggagcttatcgccagtgggatggaaacaaatatggctagcctggtgtctagacttacttcttataacgatgggcttccccagggagctcccacaagtgccgcactcagcaacatcgcactgtacagaatcgacgacgaggtgtttaactattgccagtccattggcgttgaatacacccggtatgccgacgacatcaccttctcgggcgaaagcctcgaggccgttcaaggggccattgagaaaatcaaagcattactgaactccataggcctggtcatcaataagagtaagaccagaatcttcgggccttccagtcgaaaggtggtgactggcgtggtagtgaacgaatgggctcaaccaacccgaaaatcaaggcggaagcttagggccgaactccaccaagccacgttaaatccggagaaatatgctggacaaattgacgtgatgaggggaaaggccgcctacatgctatcctacgcgggagaaggacgtcccgttgggggactacctagggggtacgtagagtcaagtctggctaagctggctgcatacatcaaggaacacaaaggctga

SEQ ID NO: 14216 - RNA, 1005 nt, synthetic construct
  source 1..1005: mol_type = other RNA
atgctgccggcgctataccccttcggcacagcccagagatggttagaggtggcccccgccttttttgacgagacaggcgtagctcaggcacagcagctcttggagaaaggggtgattccagtacagctcggtcccgaaatagcgatctacttaggtgtttctccaaagttggtgagccacatggtcattcggcctagtcggtactataacaccttcgagatcacgaaaaagaatggctcccgacgtctgataactgccccgcgggtgtttctgaagaccgttcagcgttacgtgctggattgcatcctgtcacaggtccaaccacatgacgcggccgtgggctttcgtcgaggtaggaattgtggagatggggccaggaggcacgtgggaaggccttacgtctggaacatcgatctggctgattttttccccactattacaaagcagctcgttgtcggggtgttccgagacattggctacccagacgccgctgcactgtttctaggcggactttgttgcctggaacgcaggttgcctcaaggagcacccacgtcccctgcccttgccaacttggtggcaataccaattgatatcgaactgacagctatcgcggagtcagctgggatgctttacacccgctatgctgacgacatgactttctcgagtacaaccttaattagcgctgactttagagcccgagttaccaatgccgtggaatccttcggcttctctctccgcgcaaccaaaaccaggctgatggggcccgcaactagaagagaggtcacagggctgaccatcaatcagcaagtgagcatcccgcggcatcggcgcagacagcttagagcatatttccatcacatatcccgcagccctgagcagtatgctgagcaaaggcagcaagctctgggatatgcacggtggctctacgattatcacagagaagaaggttctaacgccctccgcattgtagccaatatccctatcccacccactaaccagttctga

SEQ ID NO: 14217 - RNA, 1002 nt, synthetic construct
  source 1..1002: mol_type = other RNA
atgtctgtgcacccattcctctatcctctgggcactgctgagcgctggatttcctttctgagttcctgtctcgacttatctaaaaacgatctgagtaaagctaaggtgctgctgaataaacaactcgtcccggtcatacatgggccagagctcggtatctacctgggcgtgagccctaagctggtttctgccatggttattcggacctcccgttactaccggggatttaagattaagaagccgtcagggggaaacagagaaatctgggcgcctcgggtcttcctgaagaccgtgcagaggtacgtgctagactgcatgcttgcacccatcgtaccccatgaagccgccacagggttcaggagggacatagggatcagagatggagctcaacgacacgtgggcagaccctttttgtggaacatagatcttaaggactttttcccttctattaaccaaagccaggtaaccggattgttctcgcagctgggtttccctcatcaggcgtcctattttcttagcggattgtgctgcttgcggggcaaactaccacagggggcaccgacatctcccgcaatagccaatcttattctcttccccacagatactgaaatcggcaccctggcaagaaggaacaggatcatctacacgcggtatgctgacgacttaactttcagtgggacccaccctatctcagatgagttcagacgagaggtgggcgtcctgattgaatcagcaggctttcggatcaataagtccaaaagcaggctcatgggtccccgttgtcgccgagaggtaacgggcctggtggtcaatagaaaggtttcaattccacgggaaactcgcagaaagttacgtgcccgctttcaccgcgttagcgtgcatcccgaacgatttacaaagcagaaaggtaaactcctgggctacgccagttgggtgagccagtataggccaaaagagggacacaggtatcgcgctatcgccgaggccattccatccgagtga

SEQ ID NO: 14218 - RNA, 1029 nt, synthetic construct
  source 1..1029: mol_type = other RNA
atgatcacccctctggtgtctttcactagcttcgcccagttcgagcaagcccttcgggatagtagagtctcggctcattctggcgcttcattcagcaatagccttgaagtggatcgcctcgtcaaatccgctagggaactgtacgggcgcggattgccccctattgtgagctctcggaccttttctctgctgtttggcgtgtctccgcgactgatttccgcgatgaccaaaagtcctgagaagtattggagaacttttgagatcaagaagcgttcaggtaaaggccgtaacatagccgcaccaagggtgttcttgaagaccgtccagagattcttgctccgtttcgtgctggagaagatccctattcacccaaacgcctttggatttgctcccggtaagggaatttttaagcacgcggagcgccacttaaaagcaaggttcgttctgacactggatatcgctgattttttccccagcatcagttggacgcaagtgagggacatatttgcaaacatagggtttccagacggggtgccgagtctattggccgatctttgcaccaggaataaggtgtttcctcagggtgcccccacaagcccatatctgtccaacctcatcttcctaaaaacagacgaagcgctcacagaggccgctaatcagttcgagatgagatactcccgctacgccgacgacctgactttctcatgtgacagccagcccagtgacgaagcaaggctcgcctttgaacagatcattcgagatgcagggttcagaattcagcacagcaaaacacggctgagaggaccctcacaagcacgggaggttacgggcctgttagtcaacgaaaagattcagccatcccgacatacccggaggcttctgcgggccaagtttcataatctgctccgctccacttctttagaacaggagactctcccttctcttgggggctgggcttcctatgtaaattcgtacgacgtcgttaaaggcgaagagtatttgtcaatcgtacgctccaaagccagatga

SEQ ID NO: 14219 - RNA, 999 nt, synthetic construct
  source 1..999: mol_type = other RNA
atgaactccctaccactgctcgtgagcttggaacacacccctgacgtgatcgccgccctcaattccgagtttaacatgacagaaatcgaaacacgcagagcaatttcactcttagataaaggtttgccccctttgtttcgtcccgaggtgattgcatatctttttggagtgtctcacagactggtcagcaatatgtctagattcagtgacaactattaccgatgctataaaatacccaaaaagtcgggcgggtttcggaatatcgagacgccacgaatcgttctaaaggtaattcagcgttggattaacacaagcattctgtccaagatcgtcgtccctgaatacatcactggcttcgccgagggtaggaacatctttgttaacgggcatattcatatcggaacgcgcaacatgcttgtcatcgacattgcagatttcttccctagtgtgttcggacgaaaggttatgtacatattccggaaccttggtttcccggtgcaagtagctcggttgctgaccgggctgtgtctgtatcagaaaaggttaccacagggcgccccaactagtcccgctcttgcgaatcacgcttttcatagtgttgacgtcaccctggaggagctggcctctgaatgggggtgtaactattcacgctacgccgacgatatcgcgttttcaggagagaggttcttcgaggactcagatttacataagattgaagacatactcgagcagcacaagtttaggataaatcacaataagagccacatttccggctctggaagcaggaagatgctggccggcctggtgatcagcgaaaaatgcattccccctagaaagaagcggaaaatctggcgcgccatttttcataacgctgctaataatcccgcaatcctgcgcgataaactcccatatctcagaggcgtggcttgcttcgtgaagcagtacgacgaagagctgtaccaaaaataccggatcataatcgattccgtggcaccgtga

SEQ ID NO: 14220 - RNA, 1014 nt, synthetic construct
  source 1..1014: mol_type = other RNA
atgaatccactcccactcctcgtttctttgcctagggaacccgagtctatcgacgtcctcgctggggagcttgatctaacaccagacgagcggagtctggctgtgtctctgtacagcaggggcctgcctccactggtccatcgcaaatgtcttccttatatgttcggagtgagtccgagactgattgctgcgatgcaaaagagggctgaacattattatcgccggtttaccatcaataaacagggcgggggaacacgtgctatagtcgcacctcgtcgattccttaaactgatccagacgtggattaacggacatatatgttccaaggagaggatgccagagtgcgtaatgggtttcgtgagagggcgctcgatcttcgataatggccgggcccactgcaagaacaagaatgttatggtggtggatgtgaaggacttctttccctcagtcaccttgcagcaggtggaagccgtctttgcgtcattcggcttccctgaagaaatttgccgccagcttgggggactgtgtacactggatgggggactgcctcaaggagcccccacaagccccgcattggcaaacctcgtatttctgagcgtggatgagcggttgtcaagacaagccgccgagtggaactgcacctacacgcgatacgccgacgatattgtgttttccggcgcgcgccacttcattagcgaggacgtggcatgtctccgcgagatcttacggcaaggcggctttactattaatgacagaaaaacccgtatcgtcggtcagggcggccgacagactgtgactggtctagttgttaatggaaaagctctgccgcccaggagtaagagaagacgctggagggcaatgtttcacagggcagccaaccacccccatgaattctttgacagggctagatctttagccgggatcgctgccttcgtgaaccagtacagctccgaacgggccaccgagtatggtcggatagcccaggaagtacgagagaagtcccagcacagatga

SEQ ID NO: 14221 - RNA, 960 nt, synthetic construct
  source 1..960: mol_type = other RNA
atgcaatacttggcatctgagctcaagtggtatgacaatagcttggagagcgcgttagccctctatagacggggcctgccgccattagtgacactccccaccctggctttcctctttggagttagcccgagtctggtcgcatccatcgtggccgctcctgaggcgcattacagacattttactataccaaaggcgactggcgagccccgtagcatctctacacctcgagtcgtgctaaagaccatacagaggtggattcacgactggatcctgcctcacgctaacctgcatcgcgacgcccacgcgtttcggaagtcacgcagtattttttctaacgctcagtcgcatgtgggacaagtgaatttgctggctgtggacctggccgacttttttggcagcgtacgcttcgagcaggtggccgctatttacgaagatcttggatttccatgggtcgtagcagcccagctcgcttcactcagcacactggggggatccctaccacagggagcgcctacatctccagcactggctaatgccgtcttccatgacatcgatgtgatgctggccgaattcgcaaatggccggaccgcctcatacagtagatatgccgatgatcttgctttctcaagcacctatcaccgcttctctgttagtgatgtggacgcagttagtgggatcgtcggtgtcgggggcttcaggcttaacccccggaaaactcagattgtgggtggcgggtacaggcaccaggttgcaggtttgtctgtagcatcccacccccaacccccccgatggaaaaggagacggtggagggccatgttccaccaagcctccgtggacccatcctcctttcagaacgaagccgctaaacttgccggggtggcaagcttcgttaaccagtatcgacctgatctggccgagtcctacatggaaatcgctattcgtgcctcaagaacgccttga

SEQ ID NO: 14222 - RNA, 1224 nt, synthetic construct
  source 1..1224: mol_type = other RNA
atgcccacccgctcttactatttcccaaaagacttcctgcatctggaagagatcctcagagccgaaccggatggttttcccgatgaacaggctactaggttccgagacttaggactgcctccaatacctacgatgggggcgctgccgctgttccttggaatctccccgaaaacaattttttcaattcgccacctccccaagaaacactatcgcagtttcttgctcaaaaagaaggacggctccaagagggagatcgacacgccaaggacctatctaaaggtgatacaatggtggatcctggataatatattatcacatgccgagatcgctgccaatgtttttggtttcgtagcaggccgtagtgctgtgcagaacgcagaataccacttgggagctaaacacgtcctgaacgttgacattcggcagttcttcccatcaattaagttggatcaggttaggacaatctttagatccctggggtatcaggatgacgtcgctaatatgctgtctgagctttgttgcctggatggccatgtcccacaaggtgcccctacctcccctgccattgccaatctagtgctcagagagctggacatcgaactctccaatctggccgatgccgctggacatcggtacagtcgctacgccgatgaccttacattttcctctcaatctagaatcgagagcgaattcctgaatctggtggaatcggcagtccaagtggcaggatttgagctcaagcccgagaagaccaggtttagcgggtttgaaggccgcatggaggtaacaggcgtggtgattaacgagaaaccacagcccactagagtctggcggaaacgtgcgcgagctaccctccacaggttaagcctttctagcaggatgaccaggcgggagcttagttacctgcagggcctgatcggcatggctaaccagttccctaaaagcccccagatgcagcagctttcagagagcgccagattgattatggagcagaaaagccagaccattatcgggcggggaactaagcctactctgcccaacggcctcacctatcgccaagcagaggcattggctgggttagcccctcgtcggactaacattgaagtggcagtgagactagggacaacagaggcggcggtgaagaagcgactccaggaagcctaccgaaagataggtgccgctgaccggcaggaagcactgatctgggccgttaagaacttgtga

SEQ ID NO: 14223 - RNA, 1182 nt, synthetic construct
  source 1..1182: mol_type = other RNA
atggagaagatcctgcaggctgagccaggaggcttttccgaggaggaagctgagcaatttcgggagttgggcctgccacccatgcctagcgtaggagcccttccgctttttctgggcatctcccccaagacgatttttagcatacgtcactctcctaagaaacactaccgttccttccctctgaccaagaaggatggcactaaaagggacatcgatacacctcgaacctacctgaaggtgatccagtggtggatcctggacaacattcttaatcacgtgccaattgcggagaatgttttcggctttgtcgctggcaggtcagcaccacagaatgcggagtatcatttcggagccaagcatgtcttaaacgtggatattaggcagttctttccatccattacaatcgaccaagtgcaggaaatcttcagtagccttggttacgaggaaaacgtggcaggcatgttgtctgaactgtgctgtctggatggcagagttccgcaaggggcacccacttctcccgccatagccaacctcgttctgagaaaagttgataccgacctaagcgctctttctacccaggccggtcatcgatattcacggtacgccgatgacctcaccttttccagccaatcgtggattgacagaaactttctgaacagcgtgcagaaaatcgttgaaggcgcagggttcgaactgaaacctgaaaaaacacgcttcagtggatccgagggtagaatggaagtaacgggggtagtgatcaatgaaaagctccagcccaccagggtgtggcgcaaaaggactcgcgccaagctgcaccggctctcactctcggtcagactcacacgccgggagattagttatctgcacggtgtgatcggaatcgccggacaattccccaagtctactcagatgcagcagctgagtgaatcagccaggattgtcatcgaacagaagtctcagacagtcatagggatcgggaatagacccaccttgccaaaccgcttgactattaagcaagctgaggccctggcagctttagcacctgggcggactaatagcgagatagcgttgcgactagagacaaccgaggtggccattaaaaagcgcctccaggaagctttccgtaaagtcggggtgtttgagcggaatcaggcattcaaatgggctcagacgaacttatga

SEQ ID NO: 14224 - RNA, 1224 nt, synthetic construct
  source 1..1224: mol_type = other RNA
atgcctacacgttcatattattttcctaaggacttcgcacacctagaagaaattcttcgcgcggaaccaggcaacttcccagatgatgagacagcacgttttcgggagcttggcttaccacccatccccactactggcgcacttccactgtttcttggcatctcaccgaaaacgatatttagcattaggagacgccctcgcaaacactaccggtccttcccgctgaaaaagaaagacggaacaaagagggacattgatacaccacgcacttacttgaaggtcatccagtggtggatcttggacaatattctcaaccatgtggagatcgccgaaaacgtgttcgggttcgtggctggacggagtgcagttcagaatgccaagtatcacctcggcgccaaacacgtgctcaacgtggatataagacaattctttccttccatcaccatcgatcaggtccgggaaattttcgtcagccttgggtacaaggaagatgttgccgagatgttggctgaactgtgctgtctggacgaccgtgtacctcagggagctcccaccagtcccgccatcgcaaacctggtgctaagagggttagatgagcaactgagccgcctggccgacgaagctggtcatcggtactcgagatatgcagatgacctgaccttcagctctcagcagaggatagagcccgcctttctggactctgtgcagcaggaggtcgagcaggcaggatttgagctcaaaccggagaaaactcggttctccggattcgaaggccgaatggaagtaacaggggtcgttattaatgataagatgcagccctcaagggtgtggaggaaaaggacccgagccaagctccatagatttagccaggctactaggctcacacgaagagaattggcttacctgcagggcatcctgggtatggctgcgcaatttcctgagtcaatacagatgctcaagctgagcaaagacgccgccgggctgattgaggcgaagagtcacaccgtggtaggacgcggggagtcccctgtgttaccatctggcttgactctcagacaagccgaggttctggcgcagcttgcccccaaacggaccaatatcgaaatcgctatgcgcctgggtaccacggagtctgctgtcaagaagcgactgcaaggtgccttcaggaagattgacgtgaccgaacggcatacggcagagagatgggcctccgagaatctatga

SEQ ID NO: 14225 - RNA, 1182 nt, synthetic construct
  source 1..1182: mol_type = other RNA
atggaacaaatactgtgggcggaacaggatgggttctccgaagagcaggccatgcattttaggaatcttgggcttccacctattcctaccgtcggcagccttccactcttcctgggcatttctcccaagaccatcttctcaatcaggggtaaacccagaaaacattaccgcagtttccccattcgtaaaaaagacgggaccccacggtatatcgacacccctcgcacatatttgaaggtgattcagtggtggatcttggacaacatcctgaaccacgtgcaaatagcggataacgtctttggctttgtttccggaaggagcgctgtccagaacgctgagtttcacctgggcgcagctcatatgctcaacatcgacattgagcagttcttcccgtctatcacaatagaccagatccgcgccatttatggtagtctgggatacggcgccgaggtggcaaatttgctagcggagctgtgctgtctggatgaccgggtacctcaaggcgcgccaacgagtccagccttagccaatctggtcttacgtgatctggataaagagctgtctcggctggctctccagaccggccacaaatactcccgctacgccgacgatctgactttcagcagtagccacagaatcgaaacagagttcctcgacgcagtccaaacggcagttgaacaggagggcttcaacttgaagccggggaaaaccaggttttcaggtctgggaggtcgcatggaggtgaccggagtggtgattaatgagaagacccagccatcccgcgtgtggagaagacggacgagggcaacacttcataagctagggaattctccccggctgacccgtaagaatgtgagctatctcctgggcataaagggaatggctaagcaatttcagaactccccccagatgcagcgattttcgctcgacgttgaacagctcctcgaagccaagtcacaaactgtgatcgggaaagggacaaggcctattctgcctaacagactcacaatcaggcaggctgaaactctggctgcccttgcccccagacgaactaatatggaaattgcaatgcggcttgagacaactgaagctgccgtgaagaagagattacaggaggcatttaagaaaatcggagtagttgatcgaactgaggccttgaactgggccactcacaatctatga

SEQ ID NO: 14226 - RNA, 1224 nt, synthetic construct
  source 1..1224: mol_type = other RNA
atgcccaccagaagttattattttcctgacgattttcagcatcttgaaagaatcttgtttgaggagtacggcaataaatacgaggacgaactgagcttttatcgcaagaggcgaatccccccaatcaccaataccgggatttttccaattttcatggggatcagccctaagatcattttctctattctcaagaggccagagaaatactatcggtccttctccatacagaagaaggataagacaaaacgtctgatagataccccgcgcacttacctcaaggtgatacagtggtggattctcgacaacattctgaatcatatcgatgttgcccctaatgtttttggatttgtgatcggtcggaatgtcttccagaatgcagaatttcacctgggcgcgaagcacatcttaaacgtggacataaaacagttcttcccttccattaccaacgaacaggtcaaaaacatattttcctctgcaggctacaaagaagacgttgctgatatgctgacatgtctatgctgctacaaggggagagtaccccaaggagcacccacatcgcctgcccttgccaacttagtactgaggcaacttgataagtctctgagctctattgctgaggagaacaatttcaaatactcccgttacgccgacgatctgacgtttagcagcctagaacaaataaatgtgaactttctgaacgacgtgaaggagatcatcgagcgggagggatttaacctcaaaccagagaaaactcgcttcgtgggttcagggggcaggatggagatcaccggcatcgtgatcaacaagaagatgcagccggaccggatatggcgtaagaagacgagggcaacactgcaccaattcaagtataagacacggctgaccaggagagatatctcatatctgttcggtattaagggagtcactaaacagttccctgactcaccacagatgcagttgttcctcaaagaagctgacaacatcattcaggaaaagagtgaaacaatcatcgggcggagcaataatcccattctcccacatggcttgactcttagacaggctcaggtcttagtggagctgcgcccccagattaaaaatattgaaatcgccaagcgactcaacatttcagaggccgctgtcaagaaacgactgcaagaggccttcaaaaaaattggagtgactaaccgcagagatgccgaaatctgggcgaaaagtaatttgtga

SEQ ID NO: 14227 - RNA, 1224 nt, synthetic construct
  source 1..1224: mol_type = other RNA
atgcccaccaggtcctacttcttccccccggacttcagtcatctcgaggagattctcagagctgagccggagggactgcccgatgatttgcagaactactttcggggaaagagtattcctcctattccttcggaggccgcccttcctcggttcctgggaatctcaccaaagacaatctttagcatccggagaaacaaagaaaagcactaccgcgtttttggtattaccaagagggatggtacacggcgtgaaatccagacacctcggacttatttgaaagttatccagtggtggctgcttgataatatcctcgacaatgccaaagtcgccgataacgtgtttggcttcgtggcaggtcgttccgccattaagaatgcacagtatcattacggggcgaatcacatcctgaatgtggatatccaacactttttccccagcatcacgcaggcacaggtcgtgtccgtatttgaagaaatcggatacgggaaagacgtaagcaggtatctcgctgaactgtgctgttttcgcgagagagtgccacaaggggcaccgacatctccagctatagctaatctcgtgcttgcagctctggacaaggaactcacaatcattgccgagaacgctaattgtcgatattctcgatatgccgatgacttgtccttctcatctactgaactgatagatgcccggttccttaacgagatcactaacgccgtcgcccaggccgggtttacccttaaaaaaaccaagactaggttcgcgggcaagggcgagaggatggaggtgaccggcgtggtgattaacgaggtcatccagccaacaagggactggaggaaaaaagtacgcgcgaagttgcaccgactatcagccatttctcgcctggtgagagccgacgtcaactttttatacggcataagagggatggcggcgcagttccctgaaagtccacagatgaccgctctggccagcaaggccgaagagttatgcagaagcagagctcatacggttattggccacggacccaacccactcttacccaacggcctgaccttgtcccaggctgaagtgctagcaaatctgcggccccgcaatactaattacgacatagctatcaaactgggtagcagtgaggcagttataaagaaaaggctgcaagaggcattccgcaagattgggtcagccgaccgtacccaagcagaacgatgggctaaggagaacctgtga

SEQ ID NO: 14228 - RNA, 1224 nt, synthetic construct
  source 1..1224: mol_type = other RNA
atgcccacccgctcttattactttccgcaggactttaaacacttagaagaaatccttagggccgaaccagacggcctcccagatgaggtgtgtgagcattttcgggcgcgaggactgcctcctattacatccgaaggggcattaccacgatttcttggaatatcccccaaaactatctacagtatccggcttaactcccgcaagcactacaggaaattcgatctgaaaaagcgggatgggacagtgcgcgaaattcatagtcccaggacctatctcaaggttatccagtggtggctgctcgataacttgctcaatagggtaaagttggcggacaacgtgttcggcttcgttagtgggcgcagcgccgtgcagaatgctgagtaccataaaggcagcactcaccttctgaacgtcgatatccagcagttcttcccctcaataacccaagaacaggttgaggacattttcggccggttgggatatggtccggccgtagctaaaatgctggcagacctgtgctgcatgaatagacgagtcccacagggagctcctacttcacccgctctggccaacctggtgcttgaagatctagacaaagccttggccgacctcgccgcacgtttcggatgtcgctacagcaggtatgccgacgatctcactttttctagccatgtccggattgatgaggcgctgttagtggaagtgaccgcaaccgttcagaaggctggcttccagctgaaggaggctaagacaaggtttgccggctgcggtgaccgtatggaggtgaccggagtggtaatcaatgacgtcctccagccccctagagattggaggaagaagaccagagcaacactccacaagatggggtcacgcggccgcctcacaagagctgatatttattacttgtacggcatacgggggatggcggcacagtatgaggcctcgcagcacatgcaagcactgagagtggctgccgagggcctaatgaaggctaagtctcacactgtcattgggtttggggcgaagccttctctgcctaatggtttgacgctgcggcaagcagaggctctggctgagctgggaccacgaagaacgaattccgagatcgcagctaaactggaaaccacagaggccgccatcaaaaagaggcttcaagaggcctaccgtaaactgggtgtggccgacagagcagaagccgaaagatgggccaagaaaaacctatga

SEQ ID NO: 14229 - RNA, 1224 nt, synthetic construct
  source 1..1224: mol_type = other RNA
atgcccaccagaagttactactttccaaagaactttacacatctcgaggctattctgcgagccgaacctgacggattcccagacgagcaggctattcgctttagggatctcggcctgcctcctatccccacagctgggacactgccaatcttcctcggcatcagccccaaaatcatttttagtatccggcggaggcctagacgccactataggtcttttagcctgatcaagaaggacggcacggagcgcaccattgacacccctagaacatatttgaaggtgatacagtggtggatcctggacaatatcaccagccaggtcgagatctccagaaatgcctttggttttgtgagagggcggagtgccgttcaaaatgccgggcatcacctgggcgcccagcacattttgaatgtggatatacgacagtttttcccatctgtgaagatcgcacaagtcttcgagattttcatgtccataggttacaacgaggaagtcgctgagatgctttccgaactctgttgcatcgacggtcacctaccacaaggggcccccacgtcaccttccattgctaacttaatcctcagggacctggatgagaatctgtgtaacctcgccgaccggagtggttgcttgtatagcaggtatgcagatgacctgactttcagcagtcattcaagaatcaacgataatttcttggagtctgtgcgcaaggaggttgaaaactcaggattcaaactaaaatcggaaaaaacccgtttctctggacggggcgatcgcatggaggtgactggcgtggttattaatgagaaacttcagcccccgagggactggagaaagctaacccgagccaagttacataaactggatagctccaatcggcttactcgaaggcaacttagctacctccagggcgtaatgggaatggccccgcaattcccggattcaccacagatccagcagttgtccgaaaaggctcgtttaattgccgaacagaaactgcacactataattgggcacggccccaggcctatcctgcaaaacgggctctccctgagagaatcagaggcacttgcagcactggtcccctctaaaacaaacctggaggtcgcgattcagattggaattaacgaggtagtgctggaaaagcggctggaacgtgcttacaaaaagataggagcagaaaaccgccagcaggcgatctcttgggcggatcagaatctttga

SEQ ID NO: 14230 - RNA, 1224 nt, synthetic construct
  source 1..1224: mol_type = other RNA
atgcctactcgcagttactactttccgtctgatttcaggcatcttgatgaaattatcaagttagaggttgacggccttagtagcgcagatctggatcactttcgaaacctgaatatgccccccctgcttagagccgggaccattgccatatttctggggatttcccccaagaccatttatagcataagacggaaccagagtaagcattatcggagtttctgcatgaagaaatcagacggctcactccgtaacattgatacgccaaggacctatctgaaagtcgtgcagtggtggatcctagacaatatcctgaacaaggtcgttttcaacagcaacatcttcggatttgtgccaggaaggtcagcaatccagaatgcccaataccacatgggcgcccagcatctcttgaatgtcgacatccaagattttttcccgtccatttccattgaacgggtgagagccatctttagtactctcggcttcaatgaggaggtagcaacagtgctgagcgagctgtgttgcctgcacgatagactgccacagggagcccctacttcccctgcaatcgccaatctcgtgctgcgagacttagattctgacctaagccggatagccgaggcagagtggtataaatactctcgctatgccgacgatttaactttctcttccatgacaaaaatcgaagataccttcctggaccaggtgtacgaagcggtgaacagggcggggttcgctctgaagcccgctaagacaaggttttcaggtcgtggcggtcgcatggaggtaaccggggtcgtgatcaacgagaaacttcagccctctagggattggcgtaaaacgactagaagcaagcttcaccgactgagagacgctgctcggctgacccgcaaggaagtggcgttcttgttcggaattaagggaatgagcgtgcagtttccagactcccctcagatgcagtcattggcatttgaagctgagaatatcctcaagcagaaatcccacacagtcatagggcgcggtaagcaacccgtcttgccttcgggcctgactctaagacaagccgaagtactcattaagcttaggccacataagaccaatgctgagctggcctacgagctcggcacaaccgaagctgctgtgaaaaagcggttgcaggaggtgtttaaaaaagtttctgttacagaccgcatcgaggccaaacaatgggcagacgaaaacctctga

SEQ ID NO: 14231 - RNA, 1038 nt, synthetic construct
  source 1..1038: mol_type = other RNA
atgccgactaggagctactatttccctaccgaattctcacacgtcgaacagataatccgagccgagtccacggcagacagggaaacaagcttcgctgagtttcggcacttaaatattgcccctatcttctcggggtatgagctggcgaatatactcggcatcggcccaggtcttctcattggcatactgaggaacccccaccagaattatcgacagtttcctgtggtgaagaaaggagggggaacgagacaagtctcatctccccgcacttacctaaaggtcattcagtggtggattctggacaacattctgactcatctggaaacacctgatatcgtgtttggtttcaagcgaggaacctctatcaattggaacgctcggcatcatctgggctcacgccacttcctgaacgtggacattgccagcttctttgatagtgtcaccgaagtatccgtttacgacttgttttctcggctggggtatgccgactccgtgtccagcgtactctgccaattatgctgtctcaatggatcccttccacagggcgctccaaccagtcctgctatcggcaatcagatcctaaagccccttgataactcattatgtgagctgagttctgagcacggcattaagtattccaggtacgcagacgatttgaccttctctagccgggattttatagcccaagacttccttgatgccgtgagactgcgcgtcgccgagatcggatttgagctcaaggacgagaaaacaagatggcgggggccaggcgctcgtacagaagtgactgggttggtggttaccgacttcgtgcagccgcccttgaaatggagaaaacagtgccgcgctactctgcatcacctcgggaaaaaggaaaggctggagcaaaaggacatcagatacctcgaaggtatcctgggatacgcaagtagcttcgaggatgcaaggcagatgcaggcattgaaggccacaaccgcgagactgcttgaagagcatcgctttccctttacagaggttgatcgtaaaaacacccggtga

SEQ ID NO: 14232 - RNA, 1020 nt, synthetic construct
  source 1..1020: mol_type = other RNA
atgcccacccggagttatttcttcccacctgactttcagcatatagaagccatattgaggtccgacgatccgatggcggatgagcttcagtttgagaagtttcgtgagcgcggagtggctccactcctgactgagttcgacatcgcaacagtactggggattggtcccaagttgatcgtgagcatgctgaagaaacccaatagacactaccgtacgtttccactgactaaaaaggacggcagtgaaaggcaaatttcagctccccgaacatacttaaaggtcgcacagtggtggattctggacaatattgtgtctagagttcctgcaagtgaaaacgtgtttggcttctgccgcgggagatcaattcaagataacgctcgataccaccttgggagcacacatatcctgaatgtggacatcaaatccttcttcgacagcgtaaccttctctcaggtgctactcgtcttcaaagaactgggttactcacagccagcagccaaaacgctggctggactgtgtactctgaatggcaagctgccacaaggagcgcctacctcccctaacattgcaaatatggtcctttcaaaagtggatcgggagctcgaagcactcgcctcctctgtgggctccaagtatagccggtatgccgatgatatcacctttagcgctgatgattacatcagtgagcagttccaggtgagggtggaggacgtcgtaaagtctgcggggtttgagttaaaagccagcaaaacccggtacgccggtactggatcgagaagggaggtgacagggctaatctgcggcaccttcgtccaacctccgatagagtggcgcaaactcaacagagctcgcttgcacaacttgggcaaaaagccagttctggaaaagtccgacatcgcctatttacttggccttaggggttattctatgcagtttcctgatgccgttcagatgcaggccctcttggctggagccgacaagctgctcctgagcacaaagaagcccgttcccgaaacttga

SEQ ID NO: 14233 - RNA, 1005 nt, synthetic construct
  source 1..1005: mol_type = other RNA
atgccaagccgttcttttttcttaccacccgatcaactggcaaacgctgcagtattagcggaggccaatcctcccgagaggcatgacgagatcatgcggttggccagccgaggaattgcacctcttgtggacgaggtttccctcgcggagctggtgggtgttacacccagtttgatcttctctatactcattcgcaaggataaacactacaggtctttctgtctaccaaaagctaatggtagcacccgcatcataaactcccctcgaacatatttgaaggtgattcactggttcattctggacaacatcctgtcaaaggtgaagaacaacgactgcgtcactgcatttatctcagggcgcggaccgtacttcaacgcccaaatgcatagcggtgcgcaccatatctttcagaccgatctcgaagagttctttccatccataaaagtgcagaacgtgtatcggatgtggctgtcaatcggctacaatcaggaagtggccgagcagctgagcaatcttgtgacatatagaggcgaactgcctcaaggcgccccaacgtcacctgctatctccaacattgtcgccgggaacctggataagagactactcaaactcgcctatgagtacggctacaagtacactagatacgctgacgacattactttcagtagcaaagagaggattccccttgaatttgccgacgccgtcaatgaacagatcgtcttggggggcttcatcgagagtaggaggaagcgccggttcaaaggctttggtgcagctatgaatgtaaccgggctcaatataaacgattttccgcagcccccacgggaatggcgtaagagaacccgagccctgttccacagagcaaagttagatgccgcctttgctaaagaaaaccggggcaaaatcgcggggtcccttggagttctgcatgcagctggactgccctctcagcaccctctgattcttaatggaaaggaagctctgctcaattcgaagaattattga

SEQ ID NO: 14234 - RNA, 1035 nt, synthetic construct
  source 1..1035: mol_type = other RNA
atgccaccgcgatcatattacaatgagcctcgtccctctgactatgtcgcctttgcgaaagcctttttccccgatgaattgcaggcagctagtgagttcgccgaaacaagaggactcccctatatcaactcttccgcacacatagccgcgtacttaggtgtgagtgccagcctgctgaggcaggtgattcataagcctgcatatcattaccgagagttccccattaaaaaagcatccggggccgataggattgtctccactcctaagacctatttgaaggtaatccagtggtggattgccgataatatcctgaacaagatacaactgtccgacagcgtccacggattcagacggggcaagtcatacttcacaaatgcaagcgttcatttaaatagcaagcacattctaaacgttgacgtggagagttttttcgactccatcacatttgcccagatcaccaatgtcttcaactcacttgggtacaccgaagcgggctcactgacactcgctactctgacatccaaaaacggtatagctcccacgggtgccccgaccagtcctatgattgccaacgctatcctgcgctctctcgacagccacttggaggcttttgctgcgaaatctaatctgctatacactaggtacgccgatgatctgaccttttcgtctccagaatggattgaccagagtgttgtagacgcagttaccaagtatgtggagtcccaaggcttcaaactcaacgctaagaaaaccaaatttatgggcccaggggatcggatggaggtcactgggctggtgacgaatgctggacttaacgccagcaaggagtggcgcaattgggcaaggggcttcctccaccgtgtgtcacgggagcctgccaagcatatcggcgaaatcgaacgggtgagaggagtatacggagtgttgagacagctggatccagaaaagcacaagaaactcactgtggccgctgagcaggcaatggggcatcttgcagacgtgaaacgcgcccttgctggctctaagcaaagctga

SEQ ID NO: 14235 - RNA, 1026 nt, synthetic construct
  source 1..1026: mol_type = other RNA
atgccccctagaagctattacaacgcaccccggcccagcgattacgtggcctttgcaacagcatttttccccgaggacagcgacaatgcagggaaatttgctgaccagttcgggctcccgtacctggagtccaccagacatctcgctggataccttggaatcgccccctctctgataaggcagatcattcaccggccggcgtatcactttcgggaatttaaactgaccaagagtactggcgaggagcgattaattagtaccccaaagacttatctcaaggtcatccagtggtggatagccgataacatcctcgataagattgacttgtccgacaacgttcatggcttcaggaaaaacaggtcttacatttccaacgccataattcaccgggattcccgtcacattttgaatgtagatgtgaagtctttcttctcgaatatcaagatcgacaacatcttcaatgtgttcagcgcacttggctacggtgacgctgggagtttactgctgtcaacactaacctccaaagatggaatggctcctaccggcgcccctacttcaccaatgattgctaatgccgtctttagggacatagacactcagctgtcaaaattctcccagcaaatgggtctgctatatacaagatacgctgatgaccttaccttcagcagcatggagtggatcgagcatgatgttttggaagccgtgtcacagatcgtagaatcaggtggctttaaccttaatagcgcaaaaacgaagttcatgggaccaggcgataggaaagaagtgactggggtgacagtcaacgccgggctgaatacctctaaggaatggcgcaacagtgtgcgcggctatctccacagagcgttttctaatccagccgactatatcgccgatgctgccaaggttcgcggtatttacggaatcctgctccagtttgaccctacaaaggccaagcgtctgacacaaacggcagagcagaccatgctgcgactgttgaaagcgcaacgcgatagtgcttcctcttga

SEQ ID NO: 14236 - RNA, 1035 nt, synthetic construct
  source 1..1035: mol_type = other RNA
atgcccccgcggtcttattacaactcacctagagcgtccgactacatagcctttgccagggcctatttccctgatgagcaagaacaggctaactccttcgtgaatacatataacctaccttacatcagcagctcccaccacatcgctgcctacttgggcatctcaagcgcgctggtgagacagatcatgcacaatcccaattaccattatagggttttcccgatccagaaaagctccggcgatccacggatgatttctactcccaaaacctacctaaaggtgatgcaatggtggattaacgataacattctcaacaagattcagctgagtgaatccgtccacgggtttaggaagggaaagtcatacattactaacgcccgcgttcactttggagcccggcatatcctgaacgtggacatcaagagcttctttgataatatcacaaccccccaaattgcaaacgtattttccagtatagggtactgcgaaagcggaagtttaactttagcagcccttacttcaaaacagggtaaagctcctaccggtgcaccaacttctcctatgattgccaatgctatcttcctgaaggcagacgaacagctgatagagttcgctaggtctaaaggcctgcgttatacccgatacgccgatgacctcacattctcaagcgatcatcgcatcgacgaggaggtggtgggcaaggttaacgccattgtcaaaagctcgggttttcagctcaatgacaagaagaccaaattcatgggcccaggcgatcgtcaggaagtcaccgggatcatcattaatgagagaatgaacttgtctaaggagtggcgaaattttgcaagagggtatatccacagtatactgtcgaacccctccggaaatattcaagaaatgggacggcttctcggcatatatggggtgctgctgcaggtagaccagaacaaagagagtaatcttacgaagaatgcttacaaagcgatccgcattttgaaggacacggagcagacaaccacacatgctgagccatcttga

SEQ ID NO: 14237 - RNA, 1017 nt, synthetic construct
  source 1..1017: mol_type = other RNA
atgccacccagaagttactacaaagaacctagagtttcagactatattgcctttgcagatgcttatttccccgaagaaaggaacttggcggccgaatttgccgagcgcacccgtctgccctacgtagagtcgtctaagcacctggctgcatatgtcggagtatcaccttccctcctgaggcagatcatgcacaaacccagttaccattacagggaatttcccctgcacaaagctgatgggagcgagcgaaaaatcagtacacctaagacctatctgaaagtcgtgcaatggtgggtcctcgataatatcctcgctcgccaggcacttgacgaatgcgtgcatgggtttcgcagcggtcgcagctatgtcacgaatgcgagagtgcaccaaaactctcggcatatcctgaatgtggacataaagtcctttttcgacagcattaagatgtcccaggtggccaatgtgttcctgagcctcggatactctgaggccgggtccctgacactgacagctctgaccacgaaggacggagtagcgccaactggcgcaccaaccagtcctatgattgccaacctgatcttccgtgacgctgacttggcccttgccgagttcgcagaggccaacggtcttatatactcccgatacgcggatgatctaactttctcaggccagcatcggatccccgacgaagccgttgctaagattgctgaaatagtgaatgccgcaggttttgagcttaacatcaagaagaccaagtttatggggccgggcgataggcaggatgtgactggcgtggtggtcaattcaggcttaaatgcaccacgggagtggcggaactgggcacgaggatatctccaccgggtgcggctaaacccggataagtctgccgaagagctcgggagagttaggggagtttacggcattctgagacagttcgaccctgagaggaccaaaagcttgactagagccgctttcgagacattagaggccttgaaacagtatcgcacagagccatga

SEQ ID NO: 14238 - RNA, 1008 nt, synthetic construct
  source 1..1008: mol_type = other RNA
atgcctccccggagctactatgttgactcccgcatttccgattatatcgctttcgcaagcgcatactttccggaggaaaaagcccttgccgtggagttcgccgagaggaccggtctgccttacatcgagtcgtcaatgcacgtggccgcttaccttggcgtgtctccatctttgatccgtcagattatgcacaaaccaagctatcactaccgggagttcacgctgaagaaaaccgacggtggcgaacgaaagatctccacacccaaaacatatttaaaggtcgtgcaatggtggatactggataacattttggctcggcagccgttaggcgaatgcgtgcatggatttcgcagcggccgcagctatgtgaccaacgctcagacacacgagaagagtcgccatatcctcaatgttgacattaagtctttcttcgactcaataaagatcagtcaggtgtccaacgtttttgcctccctcggctattccgagtctggatctctcgctcttactgccctaacaaccattgacgggatcgcccccacaggagctcctacaagtcccatgattgccaacctcattttccgggatgccgacgtcagtctggtggcatttgcacaagctaacgggctgatctatactagatacgcagacgatctgacttttagcgcccagcacaggatagcagaggaaatcgtcgatcagatcgcggaaatagtggatgcggccggcttcagactcaatactaagaaaaccaagttcatgggtcctggggacaggaaagacgtaaccggcgtcgtagttaattcacggctaaacgctccacgagaatggaggaattgggctcgtggatacttgcatagaattagactgaatccaacggagaacgccggggaagtgaggcgagtcagaggaatttacgggaccctgagacaatttgatcccgagcatgcgacttcactgactaggatcgccctgcagacccttaatgtactgaagcaggcacgctga

SEQ ID NO: 14239 - RNA, 1095 nt, synthetic construct
  source 1..1095: mol_type = other RNA
atggcggcactgcaaccacgggctgaatttagctccgcgtcttacaaggcaagaactaagcagagtcaggactggtgctgtagaatgccccccagaagctactacaatagtccgcgcatcgatgattatttagcatttgccagagcctcattccctgaggagtctgaggctgcaggggccttcgccaaccgaactgggcgaccttacctggagaacgagattcatctggccagctatcttgggatttccccatccatcattcgacaaattttgcaccgtcctaggtttcactatcggacctttattctcaaaaaagctgatggcaccaaccgtattatacggacaccaaaaacctatctcaaggtgatgcagtggtggataaacgacaacatactgatcaccaaggagatggcggaagccgtccacgggtttcgcaaaggaaggagctatattacaaacgcagctgcccacgctggtgcgaaacatctgctaaatctggatatcagccgcttcttcccctcaattaccgctcagatgatcgttggcgtgtttcggaatctaggatactctgccgcgggctccgatttcctcgccagactgacttctcttgatgatgaggcacccactggggcaccaacaagtcctctcatcggtaatctgatccttgacaacttcgaccagacagtttcagaactgtcggctgcacgcaacatcacgtatacacgctacgccgacgatctgacattcagtgccagaacgaggattgacaatgagtttttaaaggaagtgaccgccttcgtggaaagctcaggttttgatctcaatccgaagaaaactcggttcctgggtaagggagacaggatggacgtgaccggcgtagtcataaatgaaggcctgaacttgcccgtggagtggaggaactgggctaggggctaccttcagcgcgccatcaggaatccagtcgagtttgttcagcaccatcctgccatcgcaggcatcttcggagtattgaagtctatcgaccccgacgaacaaagacatctcactcagaaagccaagtccgctttgaccgccatacggtccgctggagcttga

SEQ ID NO: 14240 - RNA, 1011 nt, synthetic construct
  source 1..1011: mol_type = other RNA
atgcctccgcgctcttactacaacagcccccgcgtggacgattatctggctctggctcgcgccttctttgcagaggacgctgacgcagcagccgcctttgccgaggtggaaaggaggccctatattgagtctgaaacacacctcgccagttacttaggcatctcaccaagcatcatccggcagatcctcaggcatccgaaatttcactacagaacctttaagcttaagaaggcagacggaaccaatcggattatttgtacccctagaacttaccttaaagttatacagtggtggatctccgataatatactgtacacagagcagccagatgtgtcggtacatgggttctgcaagggaaggtcctatatcactaatgccagcgcgcattccggcgcaaagcacctgctgaaccttgacataagaaagttcttcccttccattacggaagaaatgatagtcggcgttttcaggacactggggtatagtccagccggtgcgtcattgctcgcacgactgaccagtctcaacggcgaagcgcctactggagcccccacttcacccgctatcggaaacctggtgctggccgaattcgataaagctgtgtctgccgcggccaccgctaacaacatcctctacacaagatatgccgatgatctgaccttcagctctcagaatcggatcaacgaggactttttagccacaatttccaccctagtccagtccagtggctttgagcttaacctgaagaaaactaggtttctggggcgaggggccagaatggacgtaacgggtttggttatcaatcagggtttaaatctcccaattgagtggcgtaattgggcacgaggatatctacaacgggtggtgcgcaatcccgccgctttcattgaccaccgttcaaccatcgctgggattttgggcgtcctcaaaagcatcgaccctactgaggatcggggcttgacacagaaagctaagtctgctctgcgcgcaattcaagagcaagcaagctga

SEQ ID NO: 14241 - RNA, 1017 nt, synthetic construct
  source 1..1017: mol_type = other RNA
atgcccccaaggagttactatatcgaacctaaacagtcagattacctggccattgccaaagcattttttcctgaggagctgaatgacgccagagactttgtcgagcaaacagggctgccatatctgaaaacttccgcacacgtcagcagctatctgggcgtgtcccccaaactggtgcgccagatattacacaagccgtcataccactatagatttttcgagattcctaagtctgatggctccctccgagcaatcaccacacctaaaacttatctgaaggtcgttcagtggtggatctgcgataatatcctcaatcaaatgccactccatgactgtgtgcacggattccgttccggccggtcttatctcacgaacgctaaagcccacttcggccagaagcactttttaaacgtcgacatcgagagcttcttccccagtattggggcagaccttgtggaagctaccttcctagagatgggataccatagcgacggagcctcagtgttgagggatctggttacccttggtggagctgctccaactgggtcgcccacgagtccgatgattggtaatctggttctggccaagtttgacgctctccttacagaatacgtggcggatagagggttcgtgtacacacggtacgcagacgacatcaccatctctagcaagcactggatagatgatgaggttctgggggatatttccgcattggtgcagaagtttggcttccggctcaacgagaggaaaaccaagttcatgggacccggcgaccgacaggaagtaaccggtattgtattaaactcatctcccaatatacctcgcaactggtgcaacagcgtgagaggttacctgcatagggtcaaattggcccctcacaagcatgtggacgagcatgccaaagtgcagggcattctaggaactctgttggccgcggatccagaagctgaacgtaagatcacaaaggctgcgcgcgaggccgcccatcttgtaatgctggaacggctcatgcaatga

SEQ ID NO: 14242 - RNA, 1002 nt, synthetic construct
  source 1..1002: mol_type = other RNA
atgccccccaggtcctattatctcgagccgcagaagacagattaccttgcattcgcaaaagcatacctctctgatgaatatggaatagctaaagcctttatagacgagaaaggcctcccatacatacgcaacgctgaccatctggccgcctacctgggtgtgagtccctccctggtgcgccaaattttgcacaagaaggaataccactatcgtcaatttcctctacctaaggcggacggaccacccagactgatctccacgccaaaaacttatttgaagaccatccagtggtggatcggcgataacattctcagtcatgttgcgctgggggacgaggtgcatggctttcggcagggacattcctacgtgaccaacgctagagttcaccttgggtgcaatcacattctgaacatggacatcgaacagttctttcccagcattacaaaacccatgacgactagcgtctttacatcactgggctatgggaaggaaggggctggggtgttggccgagttatgtacacttgatggcagcactccaactggcgctcccacctcgcctgcaatcggcaacatggtcttggtggacttcgacagagccatgacaaagctggccggggaaaataccttaaaatatacgaggtacgccgacgatctcaccttctcttcaaacgaatggatcagtccagaattcgctctgcaggtggaggaggtcctgaaggggtacggattcgcgccaaaaggtaccaagacaaagttcatgggtcgaagcgataggatggagattaccggcgtaactatcaatgagggtaccaatccgcctcgagaatggaggaattgggctagaggatttctccatcgggcacggatgaatcctcaccagtacgcccacgagtggaagaagatcgccggcatttacggaacattaaaatcaatggaccctgatgaggataaactactgactaagcgggccaaacaggttctgaaccttgtacgctcttga

SEQ ID NO: 14243 - RNA, 1035 nt, synthetic construct
  source 1..1035: mol_type = other RNA
atgcctcctagatcctattaccattcaccacgacactccgattacctcgcatattttacagcctatttcccaaatgagttgcaagtgtgcagagcatttctggaagcaaccaactatccctatatcgggaatatccatcacttagcggcttacattggcgtttcaagcgctctcctcaaaaaaatcataagcaatgtcaactaccactacagtgacttcacaattcccaaaggtggaggaaaagagcgcgtaatttactctccaaaaacttacttgaaggtaatccagtggtggatctgcgacaacatcttctccaacctgaagtttaatgagtctgtgtacgggttcgtcaagggtcggaactacatagacaacgccaaaaaacattttggaaggaaatacatcctgaacgtggatgttaagaactttttcgattccattagcactgaggatgtgaaaaagattttcctgaagttgggctatccaatttcatcttccgaaatcttaagcaagctgtgtaccctggacaatcggctccctactggagctccgacaagtccggtgatcgccaatctgtatttcaaggatatcgacaacatccttgagctggagagtattaagaatgggtggatttacaccaggtacgccgacgatctaacgttctccgccaataccaagatcaactttgatttcttggaaacccttaagaacgtgctggacgaatatcaccttaagctgaacgacaaaaagaccaagtttatgggccctggcagccgtcaggagatcacaggcattgtggtcaattctgtcataggtatgcccaaatactggcggaataagactagaggatttttacacaacgtgaggaaagaccccagcaataacctggacaaaatacaggaagtgaagggcctttatggggttctgatctatctagatcccgagaagaatcgctcgataacgaagcaggcctatgaggtcctcgggattctcaaatcacataagaagcctctgcatgaaaccaaacacaagtga

SEQ ID NO: 14244 - RNA, 1017 nt, synthetic construct
  source 1..1017: mol_type = other RNA
atgtctccccggacgtacgatttaatcaccaacccaaagtatatcgacttcatttccgagagtgtcaggtccggctgcagcctggaggatgtaaaatttccagtgcctagtgtgtccctgccagccctcaacaaagcagaagacatctcctactatcttgggatcagtcccgagctgatctggacgctcatacgctctccccggtacaagtacaatactttcagcgtgaggaaaaagtcaggaggtagccgcgtgatcagcgctccccgtacatacatgaaggttgtccagtggtggatcaacgacgtgattctctctaaatttcctcagcgcgataatgtgttcgggttcgttccgggggtgagttacgttgataatgccgcttaccaccacggcgcggtgacaatgatgaatgtggacatcaagaacttttttcctagcatcaagtcagaagatgtgcttgtatgtttcatgaagattggctattccaagcaggtcgcccttggactcagtgccttgaccacctatgcaggatttctacctcagggtgcacctacttctcccaacctttcaaatattgttttctccgagtttgacgagaaaatttcgaacatttgcaagctatacaacttaaagtactcacggtatgctgacgacatgaccttctcttccattggtagagtcccgaaagactttcatagaattatctcacgtgaactgttccctaagttcctcctgaacgatgaaaaaacccaatatatgggggctggggacaaaaaggaggtcactggcctggtcctgggaagagatggcccagccatctctagggagaaactgaatggcctccgaggctggttgcatcagataattgccaatccagagcaatatgtggatgatctggaccgattgagcggaacactggcaatggtaaggatggtgggcggacgagggacaggacccatactgttgcaaggcggtagagccatgcaggcgatagaacagagcctgcggatctga

SEQ ID NO: 14245 - RNA, 1797 nt, synthetic construct
  source 1..1797: mol_type = other RNA
atgacattcccagcagacttccggagggtgacgaccagagaagcgctgataaccgctatcggcaccgacgaggccacttttgaagcgattttagcatttgaccccccacggacaagagaagaacagatcgaggcccttcaaagggccgctgatgccgcgtccattgaagatatcccggtattcctgagacatgacatcccgaagcggaacagacgtagaggacacagaacggtttgggagccactgctaggaaagcccggatatcgcacactcgctcggcggttggagacattttttaggatcgcccttcctgggtatcctcacgacgcagtgtacggctataggcctggaaggaacattcgcgaaaatgcctccgctcacgctggacgttccgcacttcttaatgcagatctggagaactttttccccagcattactaccgacagggtggccgctctcttcacaaagctaggactggtccctgacgtcgctgagctgttggcccgcttcgtgacgatcggtggtggactcccgctcgggttacccaccagtcccgtcatcagcaatgcagtcgccctgccattggaccttgcttgtgcagccctggcatcaggggcaaatgccacctacacccgatacgccgatgatctgacattctccggcgatgatcagctgccagcaatcgatgcgctgcgcagcgtggtagaagcccaagggttcgttctcgcagaagacaagactaggcgatcgaaaattgggcaggcgcattatgtgactggactctccatctctgaccccgcccaaccccacgtgccaagagagaggaagcggcgtctgcgccaggagctgtactacgccggaaaatttggcatcgctgatcacttccgccacagaggtgttaacgacgctcgagtgatccagcaggaggtcaaccgagtggacggccttgtcagattcgtggcccatcatgaacccgcgatggcccctcggttgcggactcaatggcggaaagccttacaggacgagggcatgaaaccaagttttgcacctcgcggtcagcatcgcgctcccttcttcatcttcgtggacgaggccgaatttgatcgcggggggcagaaggtactagcaattggtatggccgtctcacagcatggcccacgaatggccatagaggccgggcaggtacttgaagccgctttggcggatatgtatctggatggagatccagctgccctgcgtaagcgcggcttgcacttcgtcgacgccaccgaggatctgaggatagcctacgtgagaagactggagggcatgcggtttgagggctatgtggcttttgctgactgcgatgatccaagtagatatgaggaaacatatctccgactgctgggtgcaattattgaaaggaggctcaaagccgcggaatctcagttagccagcttttacatagagcagaatgagaaagtgagtgctcacagggtgaaaggcttaattcaggatgcttttgacagactaaaggcacgtgacgatcggcggcccgttgacttcgcagttcaattcgtgagcaagcctcacctcggcatctcagctccagactttctgctcgcagttctcggccgatacttgaagtcaaaggctgccaaacctgggaaaccggagcccagagatcgactgatgtttgagcggcttagggacaagtaccggctgatactcgatgtcactacctggactgaatactctcgcaggcgccctattctgccctggagcgaccagacccctccttctgacgacggggcttga

SEQ ID NO: 14246 - RNA, 1785 nt, synthetic construct
  source 1..1785: mol_type = other RNA
atgacatttccagcagactttcggcgcgtcaccacacgggaagccctgatcaccgccattggcactgacgaggccaccttcgaggccatactcgccttcgatccaccacgtacccgcgaagagcagatcgaagcccttcagcgagctgcggacgctgcctcaatagaggatattccggtatttctgaggcacgacattcctaagcggaatcgccggaggggtcatagaaccgtgtgggaacccctattagggaaaccagggtaccggacactggctaggcgcctcgagacatttttccgcattgccctgcctggatatccgcacgacgcggtgtatggttatcgccccggaaggaacatcagggaaaatgcctccgcgcacgctgggagatccgcattactcaacgccgacctcgaaaatttttttcccagcattaccaccgaccgtgttgccgccctttttaccaaacttggcttggtgcccgatgtggccgagttgctcgctaggttcgtgacgattggtggaggcctacctctgggactgcccactagccctgtgatttccaatgccgtggcactgcctctggatctggcctgtgcagctcttgcgtcgggcgctaacgctacatatacgagatacgccgacgacttaacattcagcggcgacgaccaactccctgcaatcgatgctctgaggtccgtcgtggaagcccagggctttgtactggcggaggacaagactcggaggagtaagatcggtcaggcccactatgtaacaggattatctataagcgacccagctcagccacatgtgcctcgggaacgaaagcgtcggttgaggcaggagctgtactacgctggcaagtttgggatcgccgaccatttccgccaccggggagtgaacgatgcaagagtgatccagcaggaggtgaaccgggttgatggcctagttaggttcgtggcgcaccatgaaccagctatggcgccgcggctaagaactcagtggcgaaaggccctgcaagatgaagggatgaaaccctcattcgcgcccagaggccagcatcgagccccatttttcatatttgtcgacgaagcagaattcgatcggggggggcagaaggtccttgctatcggcatggcggtcagtcagcatggccccaggatggcaatcgaggcaggccaggtattggaggcagccctggccgatatgtacctggatggcgatcccgccgccctcaggaaaagaggcctgcactttgtcgacgcaaccgaagatctgcgcatcgcttacgtgagacgcctcgagggaatgcgcttcgagggatatgttgccttcgcagactgcgacgaccccagccgttatgaagagacgtacctgcggctgcttggagcaatcatcgagcgacgccttaaagcagcagagtctcagctggctagtttctacattgagcaaaatgagggcctgggagcccaaggtcagagggctgatccagggcggctcagaccttctcaaggggccaggcgtccaagcccaggtggattgagacgacctgtccgcctcgaggctgcatcaggcgaccagagggctgggttcagcgccagaagatcccgatccatatctcaggtggagtctggagaaactgggcaagccggtgcagctcgtcctgctgatgtgagagcactcgctaggcagatttcggcagatcccagacgccacgatgttgaccgagttttggccgctactagttacccttcattggtccggccggatcccgccgagagatga

SEQ ID NO: 14247 - RNA, 1770 nt, synthetic construct
  source 1..1770: mol_type = other RNA
atggcgttcactccagactttagacgattgtccaacagggaagccgtgcggggagctctgggagtaagcgaggatgtcttccaggccgttcttaccttttcaccggaggcggtcgtgggcaaacccgaaatggagggagggttttacctcgcctccagcatcaccattcctgtcttctttcgccacgacattccgaaacgcaaccctgcccgcggggtaaggactgtgtgggaaccttctatcgaggtgaagagcgtgtataaagccctcgcccggagactggatctctttttcagggcacacttggatggttttccacatgatgctgcctatggattccgagttgggcgtaatatccgtgagaacgccgctcctcatgctggacatcggcatctcgtggccaccgacatagaggacttctttccatctataagtgtggacagaattcaggggctgttcaatgagctcggctgccggaaggatgctgctcaggccttggcccaatttgtgacgattggcggcgaactgcctgttggtttaccgaccagtccagtgatcagtaacgccgtggcactccctctggacagggacttagccgcgctggcagccacaacagggtcgacatatacccggtatgccgatgatatcgcactttcaggagatgtggagccaccttcttcagaggaaatcggccgcgtcctggaagcccagggtttttgtctagcagagtcaaaaacacgtcgatccaagatcggccaagctcactttgtcactggacttagcatttccgaccctgtcagaccccatgtacctagaaggacgaagcgggaaatgcgccagaccctgtattacgcaaagaaattcggtctggacgaccacctcggctacagaggttactctgattggcgcactgcccagaccgagattaaccgcttagacggcctggtgaagttcatcggacaccacgagcccacactggcttcgagtcttaaaagagcatggtccgaaattctgagggacagcggcaatcaggctagtttcgagccccgcaatcagcaccgggaaccctttacaatattcgtagacgaggcggagttcgagaggaatggccgacccgtactggcccttgctatggcagctacacaacaccccaacgtgattcatgacgatagcgaccgggttcttcaggcttacctgtctgacctttttgccgacgggcgacctgaagtgatacggaaaaaagggctgcacttcgttgatgcgaccgaagatctgcgcagatcttacgttgaggcgatgaggtccatgccattcgagggctacgtggcttttgtcgagtacgacggtgcagcagattacgaagcagcatacttgtgtctcctagaagccatgaccccgcgacgtttgatggcggctgaatcacaaatggcatccttcatcttcgaggaaaatgataaggtgtctagaactgcaatcgaaacttgtgtgattgctgtccattcagccctcgtggagcgttgcgataggcacccaaagtgcatcggcatcgattatgctagtaagccccatgccggaatagcactgtccgacttcctcctaggggtcctggggcggtatttaaggagcgagcccccagccccaaatgctactagccgggacagattgcggtttgaacagctgcgcgacaagtatagggtcattctggatgttacgaacggccgcgagtacagcagaagaaggccaatcgccccctgggccgatcccttttga

SEQ ID NO: 14248 - RNA, 1752 nt, synthetic construct
  source 1..1752: mol_type = other RNA
atgaccaatagggaagctctcatcgcggctattggtacagacctggctacgtttgatgcagtgcttgatttcgtcccacccccacggagagtgggatcggaagcaccggaaaccgagaaggtgcaggtgttggaaattcctgtatttctaagacacgacatcccgaagaggcgccgaaaaggcgaatttcgaaccgcatgggaaccagtgcttgccaagtccgagtacaaggccctggcacggaggctggactcattttttcggttaaccctggctgggttcacacacgattgcgcattcggatttctccccgggagaaatataagggaaaacgcaactgtgcactcagggcacaggcatctgttgggagtagacgtgcaggatttcttccctacaatcacacgtgcccgtatcgagcggctcttcacggaagtgggcgtggagacaagcgtggctgaactgctggctcggttcgttaccataggcggctccttacctctgggcctccccacttcccccgttctaagcaatgctgtgtctttgccaattgacgtcgcctgtgatgccttagctgcccgacggggagccgtttatacccggtatgtggacgatatgagtttctctagcgacgacgagctacctgacgtggaggatgtgcgaagaatcctggccgagaacggctttggtttaagtgagagaaagacccgccggtccaggattgggcaggctcactacgttactggcctttcagtgagtgatggtgtcggaccacacgtcccccgtgagagaaaacgtcgcctcagacaagaacttcattacgcacggaagttcggcctcgcggatcacctgcgccacttaggcgtcaacgacgatagggtcattcagcagcaggttaaccgcctggacggcatggtgcgtttcgtggttcaccatgagcccaggatcgctccccggttgagaaccgagtggcgtgcgctgctgaaggataatggtatgtctccatccttcgtgcctcgcgggcagcatagagccccattttacatgtttatagacgaggccgagtttgacagggatggggagcgaattctcgccttgtgcatcgcgatcactcaacatggcccccttatcgcaggagagggggctgctattctggcagccgccatgacagatccgtttagcgacggcaatgttgacgctctgcggagaagaggtctgcattttgccgatgctactgaggatctccggctggcatacgtcaccagattggcaagcatgagatttgagggtttcgtggccttcgccgatcttcctgatccggccgcctacgaggaaacgtatcttcggttgctcggagccatgatagagcgccgactgatggcagccgagagccagtatgcctatgtattctgtgaagcaaacgataaagtcgggcgcggagggatcgaggaatgcgttgcgactgcgcaacgccgcctgaaagaccgcgacgatagaaggcctgtcggcgtcggagtggaattcgtaaacaaacctcatctggggattagtgtgcccgactttctcttgggtgtcctagggcgctacctgaggtcaccacctgtacccgacggaaggccagaacgacgggagaggctgatgttcgagcggctgagagataaataccgcctgattctcgacctcacagactggactgaatattctaggcgaaggcccatcaggccatggaatgacgccggcaacgacgctccttga

SEQ ID NO: 14249 - RNA, 1746 nt, synthetic construct
  source 1..1746: mol_type = other RNA
atgtccttcaattacgatttctcccgcattaccagccggggctccctactggctgcgctttccatagacgaggcactcttcacacaagtcctagattttgtgccacctcctccggcatggtcagtccctccaagccccccagatgaaatctcaaagctgatggtgcccgcctttttgcgccatgatattcccaaaagaaacaccaagaggggccacaggacagtgtgggaaccggttttagccaagggaacgtacaaagcattgggtcgccgccttgactctttctttcgtcacaagctggacggctacccccacaagagttccttcggatataggccaggcaggaacatccgtgagaatgccgccgtgcatcgaggaaagaagtttcttctgagtctcgacctgcaagactttttccccagtatttctcggtcccgcatcgcctcaacttttgagcatctgggtatcgcccctgacatagccgctcttttagcccgatttgtaactattagtgatgctctggcgatggggctgcctacttcccccaccatttccaatgctgtggctctttgcctagatcaggcactagaggaactggcactgcggtcaggggcagtgtatactaggtacagtgatgacatctcaatatcttctgataatgccctcccagacctggccctcatcgcccaaatcgtgagcgataacgatttcaagcttgccgacgagaaaacgagactgagtgtccgggggcaggctcactatgtaaccggattaagcatctctgaccctaaccagccacacgtgccaaaagctaaaaaaagacgtttgagacaggagttgtactacgctagaaagttcggcttgggtcagcatttacaccggcagggcattaacgatcctacagttgtgcagcaggaggttaatcgactggacgggatgattaagttcgtggggcaccacgaaccaaagctgtcgtcagtaataaaacaggagtggtgcgaaattctcactgcagctgatatgaaaccgtccttcgcccccagaggaatgcatagggccccatttgtactcgtcattgacgaagctgagttcagcagggacggccaacgatacctcgctctgtgtatcgttgtgtctcagcaaatggacagggtcgcagaggaaaccggacgggtgctgagcaatgccttgaatgacctctggggcgacggtaatcggaacgcaatgctcgcccgggggctgcatttcaccgatgctactaaggatctccagctggcctacatcaaggagctggccaccatgcctttcgagggctatgtcgcgttttgtgagtacgacggccccaaaaactatcaagcagcatacctgcgcctgctgagcgctatgatccctcgaaggctcatggcggccgaatcacagtatgccgcggtgttggtcgagcagaacagcaaagttagccagacagctataaccgagagaattagcgaagtggccgccgatcttaagagaacaaacaatcgccgtcccaaagatacactatccaagctgttgtctaagccaaaccccttcctgtcgcctcccgactttttacttggagttctcgggcagtatctgaaatctaaaccggcggcacccgaaccaagagaacggttgagctttgaacggctgcgcgacaagtatagactgatccttgacctcgatgccagggctgagtacagtaggcgacgccctatcgcaccctggtga

SEQ ID NO: 14250 - RNA, 1746 nt, synthetic construct
  source 1..1746: mol_type = other RNA
atggcttttgtttatgactttactcggattaccacccgagatgccctgctggacgcactggcgatcgatggcgctttgttcgatcagatcttagccttcgagccaccccctcccgcttggcttgagagcaagtccgtgagggactccataggtaccatctccattcccgcgttcttcagacacgacattccaaagaggaatgcgtctcgggggcatcgaaccgtgtgggaaccagcccttgcaatggggagttacaaagccctggccagacgcctggatgatttttttagatacaaactcgtcggttatccccacgatagcagtttcggctatagaccagggcggaatattcgggaaaacgcagctcctcaccgcgggaaaaagtttctgctgagcatggatttagagtcgttctttccttcaataagtggcacccgagtcgccggcttattcgagactctgggcgtgcagccgaacgtggctaacctccttgctcgatttgttacactgggaaacgggctggcaatgggatttcctaccagcccggtcataagcaacgccgttgcccttcccctggaccaggctttgcaacagctagcgaggtctactggctggacatatacgagatactctgatgacataagcgtgtcatccgacaactcctttcccgagattgaccaaatctccggcgtcatcttcgataatggatttcaattggccgagggcaagacaaggtggtcccggcagggtcaggcacattttgtgactgggttatctattagtgatcctgcccaaccacacgtacccaaggccaagaagcagaaactcaggcaggaactttactacgcacagaaattcgggctggctgatcacattcagcgcaaaggagtgaatgacccaaagatcatgcagcaggaggtcaatcgcctggacgggttggtgaagtttgtgtcttatcatgagcagaaactgtctcctaggttgaaggagcaatggcacaagattatcacagttgccgatatgaagcctagtttcgaaccgaggaaaatgtcaagggtgcccttcgccttgatcatcgacgaggcagagttcccacgaggtgaccgacgttaccttgctctgtgcattgtggcaacgcagcatgtagataaagtcataggcagcacacggcaggtactgacgacagctctcaacgacctctgggcagacggaaaccggcaaagcctccttgcacgcggcctccacttcaccgatgccacaaaagacctgcagctggcctacattaaggaacttatgaccatccccattgagggatatgtcgccttttgtgaactgcacagccatcagaactacgaaactgtgtacctacggctcatggctgccatgatgccccgcagactgatggcagctgagtcccagaaggcctcaatcatggtggaacagaactcaaaggtatcgcaaactttggtgaacaggtgcatagcggacgtgttcgccgaactgaaacggaccaataatcggaggccacgtgacctaactattaatttcgttaccaagcctaatcccatcctgtcccctccagacttcttgctcggagttttaggtcagtatctgcgctcaaaacctgctgaacccgagccgcgtgagagactcaattttgaaagactgcgcgataagttccgcctcatcctagatctcgataacgacatcgagttttctagaagacgtccaatcagtccttggtga

SEQ ID NO: 14251 - RNA, 1776 nt, synthetic construct
  source 1..1776: mol_type = other RNA
atgtacgccctgcacttcagtcgactcaagacacgcgacgacgtgatctccgcacttactattgacgaggcattgttcgacaaaattattgcttttgaacccccccctcctgctgctcctagatctgcggaacctccagtgcctaaacccgaagcagccgtccaaacgatagttttgcgagagccacctgtcttcttccgacatgacatcccaaaaaagaacaaagccagagggcacaggactgtgtgggaacccgtgaattcaatgcctgcctacaaagccctggcccgtcggctcgaggcattctttaccatgctcccagactacccacatgaatgtgcatacggatataggccgggccggaatattagggagaacgccagcgctcattccggcaataagttcctcttgagcctggacattaaagacttttttccatccatcaccgtggagagagtccggtggctgtttgaagctatgagcatcgaggcttacgtcgccgatctgctagcgcgcttcgtaacaatcggcggtgcactaccactgggtctgcccactagccccgtgatcagcaatatgatcgcgctccctctggatgacttactcagggatttagctggtcagtacgaggcagtgtatacccgctattctgatgacataaccttctctggcaatggcgatctgcccgatatcgaggagatcagacccgtgcttgcagctttcgattttgccatcgctgataggaagactcgacgttcaaagcgtggccaggcacactttgttactgggctttcaatttccgatcctgctcaacctcacgtcccagcggacaagaaaaggtccttaagacagacgctttatttcgcagggaagtttgggctggccgagcattttcagcatcgaggcatcaacgaccagaaggtgattcagcgggaagtaaatcgcctcgatgggcttgttaaatatgtcgcacaccacgagccccgcatggccacatcgctgaaagagcagtggagacaaatccttgccgactcggggatgaagcccagcttcacaccacggggacagtaccgtgcacccttctatttactggtagacgaggctgagtataggcggggtgatgacaaaatgctcggactggccatggctgtcacacaacacccgcagagactggccgacgaaaccaacggtatactcacccgctttctagccgacttatggtctgatggaaacgatacagccttgaggaagaacggcctgcactacacagacgccaccgaagatctccggagtgcttacgtgaagcagctggccacgatgccgttcgagggctacgttgctgtgggcccccttgacgcggatgcaggatacgaggcctcatacctccgactgttgaaggcgctgataagtcggagactgatggccgccgaaagtcagtttgctttcttgattatagagaagaacggaaaagttgcccaggacgcgatcaaggcctgcgttcaagaagcttttgatgccttgaaacttgccgacaacaggcgccctaccgccttcggagtgaatttcgtggccaagccgaatgctttgattagcgtgcccgattttctactcggggctctggggaagtatctgcagtctaacccagcagcaccaggacgcccagaacctagagagcggctgctgtttgagaggctgagagacaaatatcggctgattgtcgatgtagatccctggaccgaattcactaggcgcaacccggtgaagccttggtcctga

SEQ ID NO: 14252 - RNA, 1749 nt, synthetic construct
  source 1..1749: mol_type = other RNA
atggaatactggcacgacttgtctcgattggaaagccgagaacaactcattaccgccttgggcatacccgcagccctgtttgacgcaatactggccttcgagcctccgattatcgggtgcccggtcagtgaccctacaattactacagagattggtatccccctgtttatccgtcacgacatccccaagaagaataaaactagggggaatagaacggtgtgggagcctttattaaacaaatctcattacaaggcgctcgcccgacggctgggtagctttttccgcttgaaactagatcaatatcctcacgattcagtctatggatacatgagcgggagaaacatccgcgagaacgcaaaagcccacactgggcatagggttctgctgagtatcgacatacaggattttttcccatccattacaaccgaaagcgtttgcagactgttccagtccctcggagtgaacgcaaccgtgtcaggccttctctcccgcttcctgactatcggtacaactttacccctggggtttcccaccagtcccattatttccaacgctattgctcttcctattgatctcgagcttaaagctctggccgacctcatcgacgctacttatacccgctatgcagatgatctctctttctctagcaatggcaagatcccagacgttgaggaagtgagggccatacttggttccaacggcttcaaaattgccgacgcaaagacccggcagtcaaaaatcgggcaggcacactatgtgacaggactatccatctcggacccgcttaggcctcatgtaccgcgcgagagaaagcacagcttacgcagagagctgtactttgctagaaagtttggccttgcagaccacctgcgtcatcggggagtgaatgacgactcagtcatccaacaggagattaaccggatagatggcttcgtgaaattcgtggctcatcacgagccacgcatggcagctgatctgaagaccggttggagggagatacttcttgccaatggagccaagccatcttttacccctagaggacaatacagagccccattttacattttcattgatgaagccgagtatgttaaaaccggccataaaattctggctctcggtatgacggtgacacagcatgcgcaggagctcatcagtcagacttcagaggtcctgtctagcgctagagctgatttatgggctgccggaaatactgaaatactactgaagaagggcctacactttagcgatgccacagaagacctgaggttggaatacgtaaagcggctggcggccatgccattcgaaggctatgtcgcctttgctccttgtaagagtcccgccgactatgaggccacatacctccgcctgctgtcagccctgattccaaggcggttgatggcagcagagtcccagtttgtatttatctactgtgaggaaaactctaagatctccagggacgaagcgaaggctaagatccagagggccttcgatgatctgaaagctagcaataatcgtcaccctaagggattcgcagtggagttcgtgagcaaacccaacctcgggatctctgcgccagacttcctgctaggcgtgctggggacctacctccgatccgagccaagtcccctgggcaaaccagagcccagggaaagattgatgttcgagcggctgcgggataagtatcgtctcatcttggatgtcgaaacgtggaccgaatactcgcggcgacgccctatcgaaccctggtga

SEQ ID NO: 14253 - RNA, 1755 nt, synthetic construct
  source 1..1755: mol_type = other RNA
atgaagttccactacgatttccggcgcctcagggacaagcagcagttactggatttcctaggcattactgaggcgttttttgagctcgtggtgtcattcgaagtgcctaccgaccctcctccaccacctgtctatgcaggtgggatcgaagagttgtccattcctccgttcttaaggcacaaaattccgaagaaaaacaagaatcgggggtgccgcgtggtatgggagcctttgctgtttaagactacatataaaaccctggggcggcgcctcaacaacttcctggtgaatttcctgagcaactatccacatcccgccgcttatgggtacctgggaggtcgaaacattaaacagaacgccgccgcacactgcggtcacaaatttttgatctcggctgacatcgtagacttctttcccagtatcacatgtgagaggatcaaaaacctctttatcgatctcgaactggtacccgatgtggctatcgcactgagcaggtttatgacgataagcggcgcattgccacttgggctgcctacatctcccatactgtcaaatgccatttttctgcccgtggacattgaattgcagtaccttgcctctcaggccggcgctacctatactaggtattctgatgacctatcattctccagtgatcgtaagctgcttatcctggaacagattggtaagtcacttcaggacaatggatttaaaatcgcagaagagaaaaccaagatttctcgccttggccaggcgcattatgtgaccggcttatcgatcactgaccccaacggcccacacgttcccagagacaagaagaggagactgcgccaagaactgtattacgccaaaaagttcgggctcaatgatcatttcaaacatcaggaggtaacggacgccaaagcccaacagcataacgtgaatcgactagatggcctggtgaaatttgtcagttaccacgagccgaagcatagtgctcgtttaaagtcccaatggtcacagatactcatttccagtggaagtcgaccatcatacgaaccacggcgacagaagagagtgcccttctgtatctgcattgacgaggccgagttccagttttcccagggagtcgttctggccctgggcatgagcgtgagtcagcaccaggacgaactcgatatggcggccgctgaggttctggataagtggctcagcgacttttgggcagctggaaatcagagggtgatcgaaaagagagggctccactttgtcgatgcaagcgaggatcttaggctccaattcgtcacaagaatgcaggcattaccatttgaaggctacatcagcttcggccggctgttgtctcctgcctactatgaggaaacctacttgcgactgatagagtccatcattcggcggagactaatggccgctgaatcccaacttgccctattcgtcatagaggagaactccaaggtgtctaatcagagcgttcgagcagctatcgatcgggcctacgatgagctcaagtcatccaataaccgcagaccacgtgcgatcatcgttcaatttagatccaaacctgacctttctataagctttcccgacttcctgttgggagtcctggggaagtacttgcggagccgcgaccaaaaactgggaaccccgattcccagggatagacttctgtttgaacgtctgcgggacaaatacaggctgattctcgatgctgacacaggtttcgagttctctagacgccgcgagattcagccttggatctga

SEQ ID NO: 14254 - RNA, 1728 nt, synthetic construct
  source 1..1728: mol_type = other RNA
atgcgcaccaaacagcaacttctaaatttcctggggcttcctgaggaggtattcgaatttgtggtgaattttgaacctccaccggacccccagccacctcctattgttgttgaaggtgttcagcagatttctgttccccccttctataggcacaagattcctaagaaaaataagaaccgaggatatcgggtcgtatgggagccccagatcgctaggcttgagtacaaagctctgggcagaaggttaggaagcttctttaagcacttcctcaccaactacccccacccggccgcttatggctatctgggagggcggaatatacggcaaaatgccgccgcgcactgcgggcatagattcttgctgtctacagacatagccagtttcttttcctctatctctatcggtcaaatcaagggcctctttctggaccttggaatttgtgccgatgtagcagtgcccttgtcaaggtttgtgacaatcggcggagtgttgcctctgggccttgccactagtcccgtcttgtccaacgcgatcttcctccctgcagatactcagctgcaggccctagcagacagagtgggagccacttacacaagatactcagacgatctgagtttctcctccaacgggaatctcccaccgatcgaagacataaccaaatgtgtccaaatccatggctttcgactggcggagggcaaaacgaaaacgtcggagcatggccaggcccactacgttaccggcctcagcatctctgacccttccagtcctcatgccccaagggagaagaagagacgcctgcgtcaggagctgtactacgcccacaagtttgggctgaactcccactttcaaaggattgaggcagcaactaccaaagaccagcagcagaatgtgaatcggctggatggattggtgaaattcgtggcttaccatgaaccacgccaggtgggtagattgaaaccagtctgggcaaacatactcgcctcctcaggggcaaggcccagttttgagccccgacggcgcaacggtcctcctttttgcatcagtattgacgaagcagagttccagaatgatcaaggcactgtgctagccttaggcatggtggtgtcgcagcaccaagaccaactcgtctcagctgctagcgaagtcctgaatagatggctcgccgacccatgggctgtgggaaacaggctggctatcaacaagcgcggcttgcatttcacagacgccagcgaagatctgcgagccgaattcgttattcggatgcagacccttccatttgaggggtacatttctttcggacagttgagcgattcatctgaatatgaggcaacatatctgagacttgtcgggtctattattaaacggcgcttaatggctgcggattccgagagcgtgttatttctcatcgaggagaattccaagataagccagaacaaggtactgttcctcatcgatcaggagttcaacgagctgaagctgagcaataaccgtcgtcccaataagatcaccatacagttccgccacaaacccgaccttaacatcagctttccggacttcattctaggtattctcgggaaatatctgaggtcaaaggatgccaagccaaacgcacccatgccaagggatagactgctgtttgaacggctccgcgatcggtaccgcttaatcctggatgctgacacaaaggctgaatttagccgaagacgtcccattgaaccatggatgtga

SEQ ID NO: 14255 - RNA, 1755 nt, synthetic construct
  source 1..1755: mol_type = other RNA
atgaccagcttatatgacttctcaaggattactacccgcgaggcccttaccgccgtgttgggaatcgatgaaacgatgctggatctggttctgacttttcagccaccgattgactcccccacagccaagaatagccctgaagctataaaaaccatcacgatccctgtgtttctgcgacatcgggttccgaaaaaaaatagaaacaggggattcagaacagtgtgggagcctatcctccttaagagtagctacaaggggctggctagaaaattagatgccttctttcgtcatcatctagtgggctatcctcacgagtccgcatttggctaccgccccggtaggaacatccgagagaacgcacaggtccatgccgggagcgctaggattctcagtctggacctggccgacttctttccaaacatctctaagggccacatcaagaaactttttctggctatgggcgtgaacgcgaccgtctctgatctgctgtcacggtttgtcactatcgagggtgccttggcactgggattgcctacttcccctgtgctctccaatgcgattgctctaccaattgatctggacctcggtatcctggccgatcagtcgaatgctagatactccaggtatgctgacgacatcacattcagcgggaacggagaactacccaccttggaacgcatagaggattgcttaaggcagcacggctttcaaattgcagaaggaaaaacaaggtggagcaagcgtgggcagtcacattacgtaactggcctcagtgtatccgaccccgcccaaccacacgttcctcgagataggaagcaggcactccgccagcagctgtattatatggagaagtttggcatcgatgaccatttccgccgcattgggacaaatgattcagatgtgatccagcaggcgttgaattcaatcgacgggatggtgaaattcgtggcacatcatgaaccttgcatagcagcccccctgaagatgcagtggaatgaaatattgcgtgtgaacgggaagaaaccaagtttcaaacccaagaagcaaaatagagagcccttctacatttttgtcgacgaggcggaattcaaacgggcaggtacgaccgttcttgctcttgccatgtctgtctcgcagcacgaagaaagaatagtccaagagacacgggaggtactcgaggctgaaatgcaagacttttgggccgccggcaacatcgacgccctgagaaagcgggggctgcacttcgcagacgctaccgaagaccttcgccacagctacgttaagcgcctggcgagcatgccctttgagggctacgtggcctttcacccgtgtgcagatcctcgaaattatgaggacacctacctcagactgctgggcgccatgatttctcgacggctcattgccgcagaatctcagttcgtctgtctctatttcgaggagaacagtaaggtgagccaggaggccgttcggagtctggtacagtgcgctcacgatcagttgaaaagagccaacaatagacacccaaagctctgtgtcgtgaagtttgtgtctaaacctaacttcggaatttctgtgccggatttccttctaggagtgctgggcaagtacttacactccaaaccagctgccgctggtggaccagaaccaagggatcggttgatgttcgaccggttacgcgataaataccgtctgatcctcgacctgtccacttggacagagtattcacgaaggcaacccattgagccctggcagtga

SEQ ID NO: 14256 - RNA, 1755 nt, synthetic construct
  source 1..1755: mol_type = other RNA
atggcctacacgtacaacttttcggacatacggacccgtgaggcccttttggctgtcctcggcattgatgagacaatgctggacctggtccttagtttccagccgccaatcgatcctcctaccgtgacgattatcccagacgtcattagtacgttgcagatccctgtcttcttgcgacatagggtgcctaagaagaatcgagcgaggggtttccggaccgtatgggagcccatactccttaagagcacttataagggtctgtctagaaagctcgacgtttttttcagacaccacctggcaggatatcctcatgagtcagcatatgggtatcggccaggcaggaacattcgggaaaatgcccaggtgcacgtcgggtctgccaggatactgagcctggacatcgccgacttttttccttcaatctctaaggagcggatagaacaattattcttgggcatgggcatgaacgctgcaatctctgatcttttgagccggtttctcactatcgaagggaccctcaccctaggctttccaacaagtcccgtcttatccaacgccatctccctgccaattgaccttgagttgagctcggtggcgcgacagtttgatgccagatactcacgttatgctgatgatatcaccgtgtccggcaacggggatttgccaagcctggaagcggtcgaggactgcctgtgccgccatggattccaactggcccctggcaagactcggttcagcaagcgcggacagtcccattacgtgacaggtctgtctgtgtccgatccagttcaaccccacgttcccagggaccgcaaacgcgcattgcggcagcagctctactacatgacaaaattcggggtagatgaccacttccggagacttggtatcaacgatcctaaagtcgcacagcaggctatcaatagcattgacggtatggtcaagtttgtggcacaccatgagccaaggattgcggctccgctgaaatctctttggaatgaaatactgagagtgaacggcgagaagccatctttcacacccaaaaggcaggataggaaacccttttacatatttgtagacgaggccgagtttgaacgcgcagggactaaagttctggccctggcaatgtcagttagtcaacatgaggagcagatcttccaggaaaccaacgaagttctggaggctgagctcggggacttctgggcagctggcgatatcaacgccttacgcaagaagggactgcacttcgctgacgccacccctgatctccgacagagctatgttaaacgcctggccgcccttccattcgaaggatacgtggccttccacccctgtgacgacccatgtaactaccagtccacttacctgaggctactcggctcaatgattagtcgtcgcctgattgctgcggaaagtcagctcgtagtgatttgctttgaggagaattccaaagtgtctcaaaagtcaattaaggaactcgtgcagttcgcccacgatgaactaaagcgtgtgaataatagacaccccatttcctgtgtggtgcaatttgtaagcaagcctaatttaggaatctccgtgcccgactttttactgggggtgctcggaaaatatctacagagcaaacctgctaatgctggacggcccgagcccagagacagactgatgttcgatcgactgcgcgataaatacaggctgatcctcgaactgccgtcctggacagaatatactagaagacatcccatcgagccgtggcagtga

SEQ ID NO: 14257 - RNA, 1752 nt, synthetic construct
  source 1..1752: mol_type = other RNA
atgtcctttaaatatgacctgacccagctgcagaaccgcgagcagctgatcaacttcctgggcctgtctaaggacgtatttgaggatgtactcgacttcgatccaacaggctccaacttctcccagttttccgaaaaggaatcctccctgattgagctccctttgttctttcggcatgaaattcctaaaaagaaccggcaacgtgggtataggacagtgtgggaacctactttcctgaagtcaccctataaggctctcgcccgtaggctaaataattttttcgcccacaagcttgagggatttcctcacgcccagacctatgggtacatcagcggccggaatattcgggagaatgctcagaaccattgcggacacacccacctcgttagcatagacctcgaggatttctttcctagtattaaggcctctcgcatagcgaccttcctgcgtacgacaggcattacacccacggtggccgatctggtgtcgaggtttgtcaccatcgaaggaagtctgcccttaggccttccgactagccccaccatagccaatgccatctgtctgccaatggacattgaacttgaggcactcgcccaaaagctaggcgcgacttttagtagatacgctgatgacatctcatttagctctgacggcacctttccatcgctgcgggagttgatggcttgtatccgtcaacacaatttcgaaattgcggaggcaaaaacaagaacttctaaattaggacaagcccattacgtcaccggtctgtctgttagcgatcctgcccagccgcatgtccccagaaagaagaaacgacgcctcaggcaggagctgtactatgccgataaatatggtcttgacgatcacctgcaccacgtgggattagggaacagtagatttgcacagcaggaaattaataggctcgacgggttggtcaaattcaccgcgcaccacgagccacgcctatctgctcatctgaaaactacatgggccaaaatcctgcagaccagcggacatcgaccatctttcgctcctaagaatcagcataggcttcccttctacatctatattgacgaagccgaatacgcccggccctcaggagataggttgctcgctcttgctatggcagttagccagcaccaggaacaaatcaacagggcaacgcaggatttgctagagactaccctgagtgatgtgtgggcggcagggaacttggacgctatcgctaagaagggtgtccatttctcagatgcaactgaggatatgagacttgcttatatcgacagaatgcggcttctcccattcgagggctacgtagctatggccaggctaccatccgccgcggactatgaggtggtgtacctccgattactgaacgcaatgatcaaacggcgcctgatggcagcagagtcccagtttgccaatctggtctttgaagagaacagcaaggttcgacaggaagccataaggaaaacagtgacagacacttacgacgccttaagagaatcaaacaatcgacaccccgagtactgcagcgtggagttcgccgggaagcccaattttggtctgtcaatacctgacttcctcctgggcgtgctggggaagtacctgacagtgggtccccaacaggatggcaagccagcagctagatacgtcttgctcttcgagcgccttcgcgacaaatatagattgatcctggatgttgacaactgggtggaatacacgagacgccggcctatcattccgtggtga

SEQ ID NO: 14258 - RNA, 1752 nt, synthetic construct
  source 1..1752: mol_type = other RNA
atgaccttccgctacgatcttagactgcttaacagtcgcaaatcactactggctttcctgggcgtcgatgagattgcatttgagaaggtgctgagttttgacccagtttcagcacagatgtccatcggcattgaggatgatattcactttttggaggctcccctgttcctaaggcacaagattccaaagaagaaccgagctcgaggctatcggatcgtgtgggaacccacggcttttaaatctgaatataaggccttggcaaggaggctgtccaatttcctctcacatcggctcaacggtttcccccattccaggacctttgggtatatcgggggccggaacatccgtgaaaacgcgagggatcactgcgggcaccgtcacctgatcagtttcgatctggagaatttcttcccctctataagcgcggccagaatcacaaaactcttgatcagtaccgagattgacccgggcattgccgacttgctgagccgctttatgacaattaatggaagtctccccttgggcttgcccactagccccactctggctaacgccatctgtctgccaatggatattgaactacaactcctggctcagcaacatcttgccacattctcccgctacgctgacgacatcaatttcagttccgacactagtctgcctcctctggaaaaatttgcaacgctggtgaaatctaatggatttgagatagccaagagcaaaacccgcatcagcaaactcggacaggcccattacgtgacagggctgtccatatcggacctggcgcatcctcatgtcccccgacacaaaaagaggaggctgagacaggaactttattatgcccagaagtatggtctggaggatcatctagtgcggagaggcattaacgatcaccagctcatccagcacgaaatcaatcggctggatggccttgtaaagtttatcgcttatcatgaaccacagctgtctgcgaagcttaaaaccaactgggccgatatattacaagagagcggtcgccgacctagcttttctccaaagaatcaggctcgccctcccttttgtatttacgtagatgaggccgaatacgttcggccagacggaacccgtctgctcgccatggggatggccgtatctcaacaccaggaccgagtggtgcaggcagccaaggatgtgcttgaggagacaatttccgatcagtgggctgccgggaacaagcctgccatcgtgaagcgcggattacacttcgccgacgcgcaccctgatttacggctggcatacatcagacggatgaggagcctgccattcgaaggatacgtcgttatggcacgtttggactctactgcaagctacgaaggcacttacatcagactgctcaacgccataattagaaggagactaatggcagcagagtcccaagctgcactgcttgtctttgagaaaaatgacaaggttagccaagtgaccatccggcaggccgtcatgcagtcatacgagtccttacgaaagtctaacaatcggcgccctgtgggttgctatattgattttgtctcaaaacctgacctcggaatgtcagtgccggacttcctcctcggtatccttggcagattcctccggtcaggaccagggaaaatggaagatcagttcgacagggacagaaaattgttcgaatctctgagagacaagtatcgcttgatattagacgctgacagctgggttgagtactcgaggaggagagagatttccccgtggtga

SEQ ID NO: 14259 - RNA, 1764 nt, synthetic construct
  source 1..1764: mol_type = other RNA
atggcgttcaattacgaccttagaagaatcaagacaaaggagcagctgctgacatacattggtctagaggaaatgtttttcgaccgcgcattaactttcaacgtcgcagaatacgaagctttgatggctgaacctgttgtggagatgggtatcaaagagctctatcttcctacgttcagcctgcatgaaatacctaaacggaatcccaagcgaggcaaacgcaccgtctgggaggcaaactctcacatcaatgacgcgctcaagggactctccagacggctgaccctcttctttgagacagtggtcccaggctttccccaccctcaaaattgtggatacgtacgcggcaggaacatccgtgagaatgcgcagttccacattggtgcaaaatacctgctaaaggccgacattgaaaactatttcccatcgatctccatcggccgaatcagcacgtttctggagaggctcggagtggcctcagaggtggccaagcttctctcaaattttctatccatcgatggaaaactgcccttgggcctgccaacatcacctataattgccaacgccattagtcacatcatggatattgatcttaactctctggccgagaagcacggggccatctactcccgctacgcagacgacttgacgttctctagcgaaggtgagctgccgaccgaaatggccattagcgaaatcgttgaactgcatgactttactttggctctggataagactaggttgagtaagcgtgggcagaatcattacgtaacaggtttaagcgtgtccgctaccgacgctcctcatgcacccaaaagaatgaaaagatccctcaggcaggaactccactttagtaagaaatacgggctggatgatcacttagaacatcttggcctcagccaccactttgcacgccagagttatataaatcacctggacgggagagtgaagtacatagcctttcatgagcctaaccttgcctcaaagattgttccactgtggcaagagatcctggaggagtctggcgactccccatctttcaaacccaaaaatcagaataggaagccgttccagttttatgtggatgaagccgagtttgagctcaacgggataaaatacctggctctcggcatgagcgggacccagcatcaagaccaccttaacgacgttactgaaaaggtgctggaagattatttggcggacccgtggtcagacgggaacagggagaagatcgataagaaaggaatgcacttcactgataccactgaggatctcaggaagatctatttgtctgccctgcagcccctgccattcaatggatacattgtcttcggcaaactcaccgctgattaccaggattgttatcttgaactgctgcgatttgtgctgaagagacggttaatggccgctgagagtcgggccgcttatttccattttgagcaaacatccaaagtatcgaaagacgctataaccaagaccgtcgacgatgtgtggaaagagctactgcgggagaataaccgctgccccgagtatgtcgtcatcgatattgtggataagaagtatttcggcgttgcagtacccgatttcatgcttgccactttctgcagatatttaacaaccaatctgagcgaaaacgactaccgacggaaagccaacatgtttgagatgttgcgtgacaagattcggttgattgtgaatgcagacacaggagaagaatttgggaggcgcaacccactggtgaaccctgacatcgagaacctgtga

SEQ ID NO: 14260 - RNA, 1764 nt, synthetic construct
  source 1..1764: mol_type = other RNA
atggcattcgattacgaccttcgtcgcattaaaactaaaggtcagctcttaacctatataggcctggaggaatacttctttgacaaagccctcgacttctcagtgacagagtatgaagcacgaatggctgagtatagcaacaagacggatattggatctttatttctcccgctcttttggaagcatgagatccccaagcggaacccaaaaagagggaatagggtggtctgggaggccgattcccatataaataatgcgctcaaagggctggcaaggagacttaccctgttttttggcaccgtaattccagacttccctcaccctcaaaattgcggctacgtccggggaaggaacatccgagagaacgcgcagttccacatcggtgccaaattcctggtgaaagcagatatcgaggattatttcccgtcgattagtttcgaacgtgtgtctaaatttcttgagaatctgggggttaacgccggaatcgcacgccagatctccaatttcttatgtattgacggaaagctgcccctgggactccccacctcacctataatcgccaatgctatcagccacctgatggactttaaccttaatagtctggcccagacgcacggatccgtctacagtcggtatgcagacgacctcacttttagttcagacgacaccttgccatctgaggatgatatttcgaaggtggtcgagcaccacggcttcgctcttgccgccgataagactagacatagcaagcgcggccagaaccactatgtaacgggtctgagcgttagtgaatccgatgccccccatgtgccccggaggatgaagcgttccctgcggcaggaattgcatttctcaaagaagtacgggctgaatgaccacctaggccatttgggcttacgagggcaaccagaacgccaaagctatatcaatcatgtggacggtcgcgtgaagtatatcgcctttcacgagcctggcctcgccgctactatagtaccactgtggcaaagcattctggaggaatccggcgaggggccttctttcaagcccaagaaccaaaacagagtgccttttcagttctacgtagatgaaacagaattcactttggatggagtcaaatatttggcacttgggatgtctgcttcacagcaccaagaccacctcaacgacacaacccagaacctttgggaagattacctggcaaatccatggtctgacggggctctcgaccagatttacgctaaaggcatgcacttcactgacacgaccgaggatctgagaagaacatatctgtccgccctgcagcccctgccattcaacggatacattgtttttggcaaactcacctcagactaccaggaaacctacttgacactgctaaagtttattctgcgccgcagacttatggctgctgaaagccgcgccgcccatttttacttcgaacagacatccaaagtcagcaaggactctttaacccgaacagtgaacgcagtgtggcaggagctaaggaatgagaataatcggaggcccgaatatgtggttaccgagatcgtcgataagaagtactttggaatcgcggtgcctgatttcatgctcgctgttttccgaaggtacctgactactacaccgagcgagaaagactaccggcggaaggccaacatgtttgagatgatgagggataaaatcaggctaatcgtgaacgccgacacaggtgaggaatttggcagaagaaatcagctggcgaaccctaacatagaggatttgtga

SEQ ID NO: 14261 - RNA, 1764 nt, synthetic construct
  source 1..1764: mol_type = other RNA
atggccttcgattatgatttacgacgggtcaagaccaaggatcagctcttgacatacatagggctcgaggacatcttttttacaaatgctagtgacttcgatgttcacaagtacgaggctcgacttgccgaacctctggtggagatgggaatcgcccagttgcatttttcccctttctataaacatgagatccccaaaagaaacccgaagcgaggcagtcgtgtggtctgggaggcatcaggtcatcttaacaatgccctgaaaagcctcgctaggcgccttaccctctttttcgagatgatcatctctaactttccacacccccataactgcggttatgtgagaggtcgcaatacgagagataatgcccaatttcacatcggagccaagtacattctgaagagcgacatagaaaattatttccctagtatctccctgcggaggctcatttctttcttcgagtctcttggagtaaactcgggcattgctatgcaactcagccatttcctgtgcatcgaccagaaattgcccctggggctgcccacaagtcctattatcgccaatgcaatctcccactttatggacatcgacttgaatggactcgctgacaagtacaaggctgtctatagtcggtatgccgacgatctgaccttctcttcaaacggcaatctgccacaggtttcagaagtgtccgaaattgtcgctaggcataagttccagttatccagcgataaaacaaaatactcaacccgtggacagaaccactatgtcacaggcctaagcgtgtcggaggaaaacgcaccacacgccccgaggaaaatgaagctggcgttgcggcaggagctgtacttttcaaagaagtatgggctcaacgaccatctagaccacctgggaatctccgatagctaccagaggcagtcttacataaatcatttagacggcagagtgaaatatgtagcatttcaagaacccagattagcttccaagatcggccctctgtggcaggaggtgcttgaggatagcggcgaggccgtgaactactccccaaaaaaccagcaccagaccagcttccaattctacgtggatgagactgagtttacactggatggggaaaagtaccttgcgttggggatttccgcatctcagcaccaagagcagctgaataacgttactaagagaatttgggaagattacatcgcaaacccctggagtgacggggacctggacgcgattaccaaaaatgggatccacttcaccgatacgaccgaagatctaaggaggacctatcttactgcactgcagcccctgccattcaccggctatattgtgtttgggaaactaggagtagactaccaaggctgttatctgtctctgttgaagactgtcctcaaacgacggctgatggcagccgagtcaagaggtgcttacttctacttcgaacagaccagcaaggttactaaatctgccatcactgaaacagttaaagcagcctggagcgagttaaagaatgataataaccgccaccctgagtttgtggcgacggaaatagtggataaatcatacttcggcattgccgtgccagacttcatgctcgctgtttttcgccgctacctgatggccgactccaaagataagcagtatagacggaaggtgaatatgtttgaaatgctccgtgacaagattcgcgtaattgtcaatgccgacactggtgaggagtttggacgccggaacccgataaggaacctggacatagaaaacacatga

SEQ ID NO: 14262 - RNA, 1770 nt, synthetic construct
  source 1..1770: mol_type = other RNA
atggcccacgattatgatcttcggctgatttccaccaaagcgcaactccttacatacataggggtggaggaggaatggttcgacgtcgcatgtggattcgatgttgctgcttacgaccaagcactatgccaggacaccgagagcgagatcggaatctatcatcatcacccatttactaggcacgaaattccgaagcggaatcccgccagggggaagagagtagtgtgggaagctgagcgttacttgaacaatacatacaaaggccttgcgaggaggctgactcggtttctcgaaacagccattacaggttttccccatccccaatgcttcggatatgttaggggtcgcaatatacgggataacgcagggaggcacgtgggtgcaactcttctgctaaaagccgatatcaaggacttcttcccgtccattgacaaagctcgcgtcgagaagctctttgttgatctcggagtgaactccgaggtcgccacgcaactgactagcttcttaactatagaaggaaaactcccattgggcttgccaacatctcccatcattgcaaacgccatttgccacggcatggacggcgatctgagcaaactggcaaccaacagtgattctacctacagtcgctacgctgacgatattagcttttcaactaacgtcaccctgcctaaggccgaggcaataagcgtgatcgttgctaggtacggctttgagctggccaaagataagactcgggtgtcgaaaagaggccagaatcactatgtaaccgggctgagtatttccgaccctcgagcccctcatgcccctcgttccatgaaacgaaacctgcgtcaggaactgtacttcgcccgcaaatttggcctggacgaccatatccgaagtctaggcatcacagaaggagacgaaattcagagatacatcaatcatcttgacggttcagtgagatacgtggccttccacgaacccaccaaggctcgtgaccttctcgtgcagtggtacgcgatcttagaggaatccggttcttcgcccagctttgaaccaaagaaccagcacgacgcccaattttgtttttttgttgacgagacggagttcgaatggaatgacaagaagtatctggcactctgtttatctgccactcagcagcaggacgtaatcaataccacgacagagcgcattctgaaggactacttggctaatccattctcagatggggatagggaggccatttcccggcatgggatgcatttctatcacgccacagaagatctgaaaagcctgtatttcagggcacttcagaagctccctttccaaggatacatagtgttcggagagcagtctggcacctacgaggcggactatacaaagctgctgtcacagatcatcaaacgccggctgatggccgcagagtccaaggctgcattcttatgctttgagcagaacagtaaggtcagcaagcacgctatcgaggaggtggttagaagaagctgggaagagctcgatcggaccaataacagacgccctaagtatgccaccgtagaaatggtggataaatcatattacggggtcggggtgcccgactttttgctgggcgtgttcagaaagtatgtgtctggcgtgcctgctgcttctccaccccagaggcagcacaatatgttcgagggcttgcgggataaaatccgagtcatcgtcaatgcggataccggggaagagttcacgcgcagacacccatttgataacttttcaattaacgacctccgagaaagatga

SEQ ID NO: 14263 - RNA, 1716 nt, synthetic construct
  source 1..1716: mol_type = other RNA
atggaacggttcatcggggtgaaatctgatcttcttgacctggtactggactttgactcggaatcatcaaacagtttcagtgagcagaattcccgcatatacatgttatcaatgcccctttttatctgccacaaaatccccaaaaaaaaccccaacagaggcgagagggtggtctgggaagccctgatggatttgcgcgatgtctacaagtccttttctcggaagctggacattttctttcaaaagcagattgagacgtatccgcacagctgcagctacggttatttgggcggtagaaacacccgaggcaacgccgagaaacatgttggaaaaaagtatctgctcaacgccgacctgtgcaacttctttgattccattagcgccgacaaagttcgtctcctgttcgtctcttgcggtgtggacgagaaaatatcacaaatcctcagcagattcctgaccataagcagtcgactccctatggggctaagcacatctccagtgatagccaatgttttagcacacaagatggattgtgaattgagtgatttagccgagaagttcaattgtcagtattcaaggtatgttgatgacttaaccttcagctctgacgagatcctgcccgagatcagccacatagaagagattgtagcaaggcataacttttccctcgctcacgaaaagattaagttctctaaaagcggtcaggcacactacgtaacagggctgtccgtgagcgacactgaagcaccacatgtgcctcgaaaaattaagaaagatctccgcaagtcactgtactacatggataagttcgggatttatgaccactttggaaggctaggcattcacgaacatgagaacgtgcagagagaggtgaacaggatagatggactcgtgcattatgtatcctatcacgaaccacggaaaagcttcgagatcaatgctatttggcagaaaattctgcgcgactccgggtttcgcccctatttttccgctcataaacaggaatacgaggtgttcaacattattatcgacgaggccgagttctctcacaacggcacaaattacttggcgctggcggctagcgttacaaataagcaacgggaaatcgacaatagtatttttgagatcctggataacttcctttctaatccttggtctgatggaaaagtggatctcatcaaggaacgtggccttcattatgtcgactgtactgaagacctgaagaaggaatttatccagtgtctccagatcctaccttttaatggctacattagtatcaatgccgtgggcgagtccaattatcgagatagatacatcgagaacttcaaaaacatcatcatgcggaattactacaagatcgatcgtagtatcgtgtttgtctcaatcgagcggaactcgaagatctccaatgacgacatctatggagttgtggattacgtcaactcttaccacctcaacgataaaagggtcatattgccgaaaggtaatgtgtccttcgtcggaaaggaatgcctgggagtcagcgtgcctgacttcctgcttgggtgtttcgcaggctacattaaggacaaccagaccgtttctgggggcgctaagtcaagaaagtttctgcaattcgagatgctgcgcgacaagattaaagtagtgtcggatctgaccactaatcagcattttacgagaaggaatccattttccaagagtaagttgaagatatga

SEQ ID NO: 14264 - RNA, 1752 nt, synthetic construct
  source 1..1752: mol_type = other RNA
atgaaccaaaaagatatgccaagagggttcgaccgcaacagaataaagttcgacttcagggttttgaaggatctgaataccctgaaactgttcataggcgtggacaatatcaccgaatcctttattaacaccaaacatgaggttcacagatggttcatccagcataggattcctaagaaaaacactactagccacgataaatacaggattgtgtggcagccaattaacggggccgagcgcctgtacaagactctgaatcggaggtttgagatattcatacgtgatatcgaccggcggtaccctcacccatgttcatatggatatgtaagaggccggaacaccctagataatgctaagttacacattggagcctccgtgatcctccatgcagacatttctaatttcttccactccatcaagatcgacaggatcaaaaagctgttcatcagctatggcatcgacgccacaattgcaaattatctcagcgagattgtgactctcaacggttctctccccttaggtgttcacacatccccaatgctggcgaatgtgtgctgcctggacctggacgacaaactgtacaaattatctcagcgctatagctgtgcctactctcgatacgctgacgatatctctatcagcggatcagatctgcccagcaaagacgaagttgagatgatatttagtgaggaggggtttgtgctttcacaaaacaaattcagtatctccaagctgggtcagaaacattttgtgacaggactctccgtcagcgatcctcttacaccgcacgtgccccgccagattaagaagagccttcgccaagaactgtactattgcaataaatttggggtaattggccatctcgagcgaatctatgatggcagttttgacttcatacagaagaacattaacagaatcgacggcttcgtccgatacgtctctttcattgagcgtaaacccaattttaaggccgactggatggctatgttgagccaggagaacttgcgtattaactatcgcaacaagtcgaatgaacaatcaaatgaatgcgttatctacatcgatgagacaaaattcgagtttaacggggcctcctatttagccattgcccttgtccagacctcgaattttgaccttattgagtcagaatccaggcgcatttacgaagaatatatcgctgacccatttgcagcgggccggaaggacaacatcgccaaaaataaaatccacttcacggatgtgcatcctgatctgcagggcagatatatcgattggctgtacggtatagcttttgacgcgtacattgctttttgtaaagaggaaagcgccaactatcaatctctttatctcagtctgctctcgcgaatactccccgatcgactaaggcatttgcggaaccacaatgtaaagctcatcctagagcagaatccagaggtcagttccgaatccatcaagaacaaggtattcggcatcgataattacctgaagttgcagcagatccgcagtgcaaagactagtgttatagtgggatctaagcaagaatactatggattctccgtgcccgactttgtgctggggttgagcgccagatacgcaatttcaaactctggaaagcagcagaatgacagctcaaaccccccggctagagataccctgctgtttgaaaaaatgcgggacaagattcgggtcgtgtacgatgtggatgcaaagaggaagtacacgagacacaggccttttgtccctttccagtga

SEQ ID NO: 14265 - RNA, 1746 nt, synthetic construct
  source 1..1746: mol_type = other RNA
atgttggatctgcggaatatgagggacgcatctgacctcgctaagtaccttgggatttccgagggccgcgccaggcagttattggtggctagtccggaagaggtcttcaagacttatgagatccccaaaagaggcaatcgcggtgttagagaaatatgggaggtgaccgaaacctgggcggccgacatgtataagggacttgcacggcgcctgaatgctctgtttgtcggcgccctggcgggttttcctcacccttctgcgcacgggtatgttgccgggaggagtacctggactaacgccctggcccaccttggacagaggcgagtcctatgcacagatatccgcgcctttttcaaatctatccagcatgaacgggtgcgacagttgctcctgcgctgtggtctaaataacgaagctgccgctgcactgagtagaatcctcagctgggatgaccacgtcccactcggattgcatacttcacccattgttgctaacgcagtgtgtcacgatctcgatgctcgcttacgggccttagcacctgcagggaggtatactcgctacgccgatgacctgtttttctctggccctgaactccccacccggaacgacgttgctgctgcccttgctgccgacggctttgagattgcccccaggaaatgggggttagccaaagcggggaggggactctatgtgaccgggctcagcctcgaacacggcgatcgtcctagagcccctagatcaatgaagcggagactcaggcaggacctccaccatgctgatagatacggtttgcgacaacacctggggcggagaggatacccttccttccaatccggaatcaacaagatacatggaaccatacaatacctgcgcggcatagaacgggacttgggggaccgtctaaacaaggagtggatggagctgctgggaagagagggagtcgcggtagcataccccacgcaagagaggctcgcgggtcgtactgtgctgtttctgctcgacgagtccgtccccccagacagagacgtgcttctgttatgcctgacagtggtggaagacgtggagtgggtttccgctgaagtgcagcggttcctggacgacaggatcgcagacacaatgaccgctgaaagcgaacgggcagtgctaaaacagcggggccttcattggaatgaacttacacctgacaacaggacacgggccacggaactgctacgaactctgccattccgtagtttcgtggcatacgctgcactgccaaagcaggataaggcaagctatgcagaaacctacgcccgtacactggctcagcttctgagagatcgcatgattcgatacgatggctgcacgctgaagatcgtcggcgaggagaatccaagggtaggacgccgcctgctgtctgagattgccaattcgatcttcagcgagctggagtgcttaggcgcacgaagacccgctgccgtgccaagttgtgaggtactgagcaaaggttccaacccggccttgccccttccggatctcgtcctgggggtgctgggagattttgccttgtcaatcgtcagaagcgagcgggaagaggtgggtgacggcaaaaagaagaggagatctggcgatcaggcctcgattcgctttgagcagatctcacataaagttaaagcgatttacgatttgcagtcaggggtggtatattccaggcgaaatcccttcaccgcctggccactcgataacgccagcacaggcggcgagtga

SEQ ID NO: 14266 - RNA, 1788 nt, synthetic construct
  source 1..1788: mol_type = other RNA
atgtcattagacgattatattccgcaattggccaggccagcgaatgtggagcagttggccaaggcactgggcgtggcaacgcagattttcacttttatcgctgacaattctgagccggagagaatctaccgccgccatctgattcctaaacgggccgtcagagctcttccctccgtgccagtagaggatgccaggggaatcgttactctgagcctggatagcttcgacctgtcgaaatatcgggtggtttgggaggcccactctcccgtgatcaaacacgcacacaagtctgctgcccgggttctcgagagatatttgtcgcgtcccggagccctgttcccacatgaagcagcatttgggtacgtgaaagggcggtctaccaggcataatgcaaggaggcacgtaggcgccaagcgcttgctgagcgcggacatacaggatttcttcccaagtatcacgctcgcacgggtggagcttgctttagaagccgctggtttgcaaccggctgtgaccaatgccctgggccgatttttaaccattgaaggaagcttacctcttggtcttaatgcctcccccatgatcgccaatctggtggccactcctctagaccacgatcttagtgcgctggctaaagaatggggactcacttacacgaggtacgcagacgatattacattgtctggagacggggaattgccaacccgcgaaatcatcgagacagtgctcaagcgccatttctttcgcctgaacaaatcaaaattccgtaccagtaagctgggacagaagcattacgtgacagggctgtccgtcgctgataaggctgcgccacacgcccctcgtgccatgaaacacaagctccgccaggagctttattacatcgagaagtttggctttctggagcatctcagcagagggggtgagggaggtaccgagcagcacaacgtgaaccgtttggacggcacggtcaactatgtcagctccattgagccgagactagcacatcgcttgcgagccgcttggaagaaggtctgcgacgaaaacgacatcgccaaaagtttcgaacctcggccagtgattcagctgaggccagcctcttggtttgttgacgaggcggagattgtccatcccgatgggaccagacttctggcactctgcctggctgacgtgctagaacccgggagactcgatactgaacttaggacactctttgctgaagaagccggtgatgcctttggcaccgcggaccctctaagcatcatacagaagggcctccactggtccgatgccacatggagccagcgggaagccgtggttaagctgatcgcagcgtcccctgtacgggttatggtcgccatggcacctttaacaagcccctcagagtacaccactacatataccgacctgctgtgtgaaatcctggaaaccgccctgaagatagctgatgacgctgaaatagccatacatgtagaggagaatagatcaaaggtttctaaggcagacgtacaaggcgcagttactcgagcttatacagagctcgagacaaagaaccagcgacgacctctccaagcccccgaggtcaacattgtgtccaaaggggctaccccctgttgctgtgtgcccgatactgtcctcggcgctctgcacaggtacgccgtgagtcggaaagatggcaaagagggatcactggcagtcacactgttcgaaagactgcgcaaccactactccgtgatcttcgaccaccatgctaataaaatttaccaccacaggtcaccattcaagagatggtga

SEQ ID NO: 14267 - RNA, 1116 nt, synthetic construct
  source 1..1116: mol_type = other RNA
atgggcagcgctcaacctggccatcaggcctgtccccaggtgtgcagaacagggacaggagctctgccattgccagccaggctccctgtgagtcacgaagccgcttttgggtacgtgaagggtcggtcaacccggcataacgcgaggcgccatgtcggagccaaaagactgctctccgctgatatccaggatttcttcccatcaattactctggctcgagtagaacttgctttggaggctgcagggctgcaaccagccgttacgaatgcactgggaagattcctcacaattgagggaacgctgcctctgggcctcaatgcctcccccatgatagcgaacctggttgcgacccccctcgaccatgatctgaatgctctggccaaagagtgggggctgacctatactagatatgctgatgacattaccttgtccggagacggtgagctgcccacaagggagataatcgaaactgttcttaagcgccactttttcagattgaacaagagtaagtttcgcacttccaaactgggccagaagcattatgtgactggtctgtcggtcgcagacaaagccgcaccacacgcccctagagccatgaagcacaagctccgccaggaactgtactacatcgagaaatttgggtttctcgagcacttaagtcggggcggagaaggcgcccctaactctaccacatcaattgtgtggatggcacggtctaccatgtacccagcctccaatcgggtgtggaggatcgactgtgccctaccaggcagacggtacgcaacacgcatgaccagtccgaatcacttatcacttggtccctctagcagctgtgatttgcttcgggggtctttaatgcgtcctcgctcctctatccgaatggcacacgggttcagcagatccgcgctccctaccttctggagcttggcaggttggatccagaactatggacgatgcagccctaaacgtcccgagatgaggagtggacagccgatccgctgcctgtcttcacggaggggctgcattggcgtcatgcgacacgggccctctgtacgtccatggtcgagccttagccccccccatctaagcggcagttggtccccgtggaggaggtga

SEQ ID NO: 14268 - RNA, 1788 nt, synthetic construct
  source 1..1788: mol_type = other RNA
atgtccctcgataactacgtgccacagctgagccgcccttcttccgttgagcaattggctaaggccctgggcgtggcgacacagatatttacctttatcgtggagaatgacgaccctgaacgaatataccggaggcatctcatacccaaaagggctcctcggcgtttgccattggtccccgtggaagatgcggggggtatagtggaggtgagtctggactctttcgacttttcgagatatagaattgtgtgggaagcacagaatccggttatcaaagtggcccatcgcagcgcagctcgggtcctagagagatacctctcacgcccaggaagtcaatatccacacgaggcggcctttggatatatcaagggaaggagtacccgccacaatgctcgtaggcatagcggagctaagcacttgctgtcagccgatatcaaggattttttcccatctatcacgctggcacgaattgaactggctctggagcaggctgggcttaactccacagtctgtaacgccctcgccagattcctgaccatcaaggggagcctgccactggggttgagcgcatctcctatgatcgccaacctcgtcgcaacatcccttgaccatgacatcagcgctttggcgaaggaatggggcctatcttatacacgttacgccgacgacatcactctttctggagatggtccactccctgccagagagatcatcgaaaacattctcaagaggcattttttccggctgaataaggctaagtttcgcacctcaaaaaaagggcagaaacactatgtaacgggcctctccgtggctgacaaagtcgccccccacgtgcccagagttatgaagaggaagctgcggcaggagttgtactatatccgaaaattcggttttcttgaccatttaagtaggagtggcggtcgaggcactgagcaacacaatgttaatcgactggacggcactgtgaactatgtatcaagcattgaggccagctttggctacaaactgaggagcgattggaaaggcatttgtgaggataacggaatttcccgctccttcgagcctcgcccagtgattaaccttaggcacgcctcatggttcatcgacgaagcagagataattcacccggacgggacacggctattagccctctgcctcgcagatgtcctggaacacgatcggctcaatgtggagctggtgactcttttcgctgaggaagctggggatgccttcggtactgcggactccctttccattatccgtaagggacttcactgggccgaagcgacgtggagccaaagagaagccgttgttaagctgctggctgtgtcccccttcagagcaatcgtagccgtagcacccctccccaacccccaggaatattctcgggtgtatacagacctgttaaaacagattctggccactgccctgaaaaccagcgatgatgccgcagtcaatatgtacgtggaggaaaaccgcagtaaggtggccgagtctgaggtacagattgctgttaagaccgcttactttgacctggaagagaaaaaccagcgacggcccttaaagctgccgtgcgtcaatattgtgcccaagggggcaaccccttgctgttgcgtccctgatattttattgggcgcactacatcgctacgcaatatcgaagaaagtcgatgccgagtcaggactggccgtgaccctctttgaacggctgagaaataggtactcagttatcttcgacggccacgctgagaaaatctaccaccatagaagtcctttcaagaggtggtga

SEQ ID NO: 14269 - RNA, 1716 nt, synthetic construct
  source 1..1716: mol_type = other RNA
atggctaggcagatctttgagttcattgctgataatgagaatccagaattgatctaccggagacaccttattcccaaaagagccgcaaggcctctgccgtcggtacccatcgaatccatggatgggggtgtggagttttcactcagcggattcgacctttcgaggttccgggttgtgtgggaagccgagaatcctgtgatcaagcatgctcacaaaagtgcagccagagtcgtagaacgttttttgaccaggccaggcactggctttccacactccgccagtttcggctatgtcaaggggcggagcacccgtcataatgccagtcaacatataggtcgcaaatacctgcttagcgccgatattaaagacttctttccatctattacggcagcaagggtccagctggccttagaggaggccggtctaaaggccgttgcggcagaggcactatctcggttcctcaccgtgcagggctctctcccgcttgggctgaatgcctcacctgtggtggctaacctggtcgcactcccactggacaaggagctcgatgagtttgcaagaaaactgggactttcttattcacgctatgctgatgatgtgaccttgtctggggaccagatgctgcccagcaaagacgaagtggatcagattttcaagaggcatttcttcaggatgaatcgagtgaaattccgcacatccaagcgcggccagaaacactacatcacaggactgtccgtcgcggacaagttcacaccacacgctcctcgagctatgaagcaaaagcttcgacaggagctatattatatagacaagtacgggtttagcgaccacatctcccgtagtaggtgcggtggaactgagcagcataacgtgaacagagtggacggcatggtgagttacataagttccgttgagcctcgccattcatacagactccgcctcatgtggaagcggctgagaaccgcgaataatatcgagagatccttcgaacccaggcctgtgatccggtttcgacaagccagttggtttgtcgatgaagctgaattcacgcacccctcaggggtcccgcttttggcagtgtgtctggcagatgtgttggatagcgcccgcctggatgaagtgctcgccagctttatcgaagaagaggccggagatgcttttgggtctgtcgacgaggtcagcatcgtgcggaaaggcatccactgggtagatgccacttggtcccagcgagagggcttagtcaagatcctagccgaagcgcccattagagcaatggtcgccttcgctcctctgcggaacggcgaagactactcaaaggtttatctggctctgttgcgcaaaattctcggtacagcgttgaaggttgccgatgacgccatagtgaagatttacgccgaggaaaaccgctcaaaagtccgcaagtccgacgtagttgacgccgtgtcgtctgtgcatagtatgttagcagacaaaaacgagaggcgacctctgaaggtacccgaggtgaacgtggttcccaaggcttttctcccatcttgttgcgttcccgacgccttactcggcgctctggctcgttacgcgacttctaggtctgagtccgaccggggaggactgagcgtaaccctgtttgaaagactgcggagcagatattccctgattttcgatgagtacaactcaaaagttttccacagcaggagcccatttgtgcggtggtga

SEQ ID NO: 14270 - RNA, 1788 nt, synthetic construct
  source 1..1788: mol_type = other RNA
atgtcacttgacaatttttaccctgacctgactaggccatcgacagtgccccaactcgctaaggctctgggggtgccactggatattttccagatgatcatggattgcagcgacccgagtctgatatatcgtcaacactttatccccaagaaagtctgctcgatcatgcctggcacacccgtagccaactcagatggcacgatcgaaatagtgctgcctaatcatgacctcagtcggtatcgcgtcgtttgggagcctaccaacaacgtcgtgaaatttgcacacagatctgcagccggcgttctcgagagattcgtgtctagacccaatagccaggctgtgcatccatgcgccttcggatacgtgaaaggtaaatcaacccgtaagaatgcccagcagcacctgggaaaatatttcttgctcagtgcggacataaaaaacttcttcccgtctgtgagcgtggcaagaattgaggttgctttacgcgtgattggcattaaggacgaagtcgtcgagtccttagcgaaatttttcgccattgaaaacagtctgcccttaggcctcaacgccagtcccatcatcgctaacctggtggccaagcctctggacgaggacttgctcagtctcgcggagggatttaattgcagctacacacgatatgccgacgatttgaccttttcaggaaatgagtcacttcctaaaaaggaagacatcgagtttattctacggaagcataggttcaaggcaaaccagagcaagttccgatactccaaaagagggcaacgccactacgtaaccggactgtctgtagctgatgtgcacagcccacacgcaccgaggaaaatgaagaagcggctgcgccaagaactcagattcattgagaaattttcactggacgatcatttcagcaagatcaagaagagcggcgagcgacagcacgaaatcaatcgcatcgatggcactgtgtcttacgttgcctccatcgaacggaaactaggggccgacatcagaatccaatggaaggctatttgtgataaagaacaggttggccggtcctttgaaccccggcccactacccttttgaggtccgcggtgtggttcatagatgagacagagtttgacgccagggacggtactaagctgctagctctctgtctggcagacgtgctggacccacagcggctaaatatagatctgttgaccctgttttcagacgagtctggtgatgcctttgggcttggtgccgccgccggaaaaatgattcatgacgggttacattgggttgatagcaatcttacacagcgagagaaggtagtcaatgtcctgtctatctccccaattagggtaatggtggcaatggattccgtggaaggggctacttatcagaacgtctacctggatctgctgcggaggcttattaacgttaatctccgcggagccgacgacgcaagagtgcatattgtcatcgagagtaacaagtccaaggttcctagacaactggtcatacaggcggtgcgagacgagtgtgcccttctcgaagctgccaaccagcggcgtcctctggagatccctagcatcaacgtggaaggtaaggattggacgcccgctatgtgtgtcccagatgtgttcttgggcgtgcttgctcagtacgcaaactccaagcagaaagggcagggagaatttatcgtaagcttaatggagcgcttgcgtaataggttcgcagtcgttttcgatgaacacgagggcgcaatttatcactctgggaatccattcaggcgctggtcctga

SEQ ID NO: 14271 - RNA, 1512 nt, synthetic construct
  source 1..1512: mol_type = other RNA
atgaacatcgatagattcatccacgctcatgcccctagttttatccacgagaacgcttatggatacataaaatacaggtctaccagggctaacgcttctagacataagggagccaagattatcgtgagtgccgacataaaggaattcttccccagtataagcattggacacgtggagcatgcccttcgaaaaaccgggatgaaaaaggaaacagcttccctgctcgccaagtttctgacaattaacaatagcctgcccctggggttgaatgcctctccaacgatcgcaaatctagttgctaaccctattgatatagaattcaccaatctggctaagcgaattaattgcacgtataccagatacgctgacgatctcacattttcaggcgacaatacacttccctctcacgacgagatcaacgggatactgggcaaatttggattccgctcaaatgagcgcaaatttagggcgtcaaaacggggccaaaagcactacgtcaccggtcttagcgttgccgaccctaagcagccacatgtgccgcgcggactcaagcgtaaactccgccaagaattgtactacattcagaaatacggtctgaagaatcatgtggaaaagtctgactccgaatcaactcagcggatcatcaaccggctggatgggacaatcagctacgtcactagcgtcgagagtcagctcacaagaaaacttcgatccgcatggaccagcatttgtcaaaccgagaaagtcggccgctcctttgagcctaggcccctccacatcctgagggatgcatattggttcatcgacgagagcgaaattccgcgaccagacggctccacctgtctagctctctgctgcgtggaactcagtgcaaacaccatccaggcagatgaagcatctctgactagcctgatcgagaaggaaaccagcgacgcctaccaaacggccaaatcgagcctgcactgggcggagtctacattgtcccagcgtgagaggatcgtcgatacattaatgccaagactgttctctacttttgttgtgctggagaatctctccgacgaaccatacaaagatacttatattcgggcgttgaagctggtaatcgatcccattttacggagaagtgatgacgcaatcgttgaaattatgatcgaggccaacccatcgaagatttcacagcagtccgtaacatcctctattaaggacagttatctgagactggtggagttgaacgagcggaggcccgtggaaatgcccaagattagagtggagaaaaagggtgccaggcctgcgttactgttaccggacatcatgctgggggccctttccacctatgccaagtttcagcctggctcaaactcgacccttgagtattcattcttcgaaaaactacggactaagtatacgatcattatagataccgccgagaagaagttgtaccaccgtaaaaatcctttcactccctggcatactcgcaacaatacaaagatacagccaagcaaagcagagtga

SEQ ID NO: 14272 - RNA, 1722 nt, synthetic construct
  source 1..1722: mol_type = other RNA
atgaacaccgctccacctggatctcagcagctgtttagactggcggacgtgcgaactatcgaccagcttgctagggccctgggtgttcccttacaaatttttcaggatgtgatcgcctgtgaggatcctcagcagatttatgccctccatgccattccaaaaagacacccgagaaatcccgaagactaccggatagcttgggagtgccgacaggaaccagtggcacggagccataaggctgtcgcaagaagactggacgatttcgccaggcgccgcccgatatcatacccccatgccgccgttcatggatatgtgcggggaggtagtacacggtccaacgcacagcctcactgcggtgcaagagtcgccatcagggccgacattgaaaatttcttccctaccattacactggaacgaattgaagctatgctaaggaccatcgggatgcaagccgcacctgcgaaggcacttgcccgcttcgtcactattaagggggcgttaccgctgggattggcggagtctcccgttatcagcaacttagtatgtctgggcttggataaagacttgcagtccctcgccgaagagcgtggtgtccgctatacacgctacgccgacgatatcactttttctggagatgccaaccttcccagcagggagcaactccgggcaacacttgcaaagcatgggttcagactgagtgagcggaagttccgcaagagtaagcgcgggcaggctcacttcgtaacgggcctttctatcagcgaacgggattacccccacgtgccaaggaagctcaaacgcatgctgcgaatggaattgcacttctgtgaaagatttggcataggctttcatgccgagaaaatcaatgaggactttcgaaaaacgtacttgcgcctggagggaatggtcaagtacgtggcgtatatcgagcgcagaaagtcaaaagaaatcaacgaccagtggcaaagggtcctggccgttcacagaggcccaacttcccacgcaaagatagagagcaggaaacgggatgacaggtttgtaattgctgatgagacagagtttaccgtggatggcgtgaaatatctggccttttgctgcgtgcggattgctaatctggagagggtggaagaggcaatccagatcctcctgggcgactatctaactaagcccggggccaagggcgatctggacgtgttgcaggcagtgggcattcactacaccgacgcccacttcgatctgaggaccaagaccctagaccttatgaccgacttcttatcttggagcgcatccatacactttgcccggctggactcatcatccaaatacaaagacacatacctgaaattgttcgctgactccattcgccaggagctcatcacatcagatgagtggacacttcatatcctcgtggagcgaaatgacaaagtgaagctcccctccctcaccagggtcatggaagctgaatatcaacgagctgctaccgatggcgctcgtcggcctagctctctcccatcggtgcaaagagtcgaaaaggcgagtactagtagcctaaccctgcctgatttcgtgctggccacgtttagaaactacgctcagctggtaccagatgaccgtgttctcgacttcgagagaatccgtgaccgggttaggtatatacatgatgccgatcggggggtctactatactcgtaagaaaccctttgtggggattggatcggcttga

SEQ ID NO: 14273 - RNA, 1725 nt, synthetic construct
  source 1..1725: mol_type = other RNA
atgacgactgtttccatgcagccatgtgcacattttagactcgctgacgtgcgaactgtagatcagctcgctcgagccctgggagtgcctctgcaggttttccatgaagttatcgcgtgccaggaccccgggcttatttacgctatgcatagcattcccaaaaggtcgcagaggaaccccgatgggttccgcgtggtgtgggaatctcgcacggaagccgtcgcgaggtcacacaaagctgcggctagacggctcgacgacttcgcaagaaggcaggaaatcggctacccaaaccctgctgtccatgggtatgtccgcggagggtcaaccaggtctaacgcactaccgcattgtggtgcccgggttgtggtgagggccgatatagaggattttttccagactatcacgttggagcgtgtcgagagcgcctttagagccatcggtatcgctcctgaaaccgcccatagtctggcgctgttctctactattaatgggaaacttccactgggtctgccagagtcccccgtggtaagcaatctggtctgcctcgatcttgaccgggatctgaaggccctggcagaccgacacggtgtcaaatatacaaggtatgcggacgatatgaccttctcgggcaatgagaacctcccttctagagaagagatccgcaccgtcttactaaggcacggctttcgtctttccgatcggaaatttaagaagagtaaacgagggcaagcccacttcgtgactggactgtcagtatctgaacgcgactacccgcacgtgcctcgtaaacttaagagaatgctgcgtctggaactgcacttctgcgaaaagtatggcctggcaactcacgctgagaaccggcgagagagcgaacgcaagacctatctgcggattgacggcatggtgaattacgtgagcttcatcgagcgccggaagtctgctgccatcaaaggccaatgggataggatccggaagaaacacctgggctcaaccttgtacgctagattagccggcaaagaaataggagatcggtttgtggttgcagacgagacagagtttgaggtggacggtatcggctacctagccatctgttttgtacggttgagtaatttggaggacgtggagaaatccctggacctgctcctcggagattatctcaccaagccaggagccaaggggaatctggatgttttaaagaaggtgggcattcattacgcagacgcccactttgacttgcgcacaatgaccctggatctcatgactgagtacttgcagtggagcgcaagtatttgtttttcaaggctgcggacaagcgacgattataaggaagcatatttaaggatgttcgcagaactcgtaaaacaggagtttgtgacctctgacggccttagagttgagatgctggtcgaaaacaatgacaagattaagttacccgcacttacacaagtgtgcgaggccgagtatagacgatccgaaagtgaggacggacgccgcccaatatccctgccctccattcgttccgtcaagaagagcgagattcgaagtttgacacttgccgattttgtgctcgccgccttcagagcttacgtgctgcgggctcacgacgatagagtcctcgatttcgaacgcataagagacagggtgaggtacgttagggacagcgactcagataacttctacacaagaaagaaacctttcctaggaatcggggatgtcacctga

SEQ ID NO: 14274 - RNA, 1269 nt, synthetic construct
  source 1..1269: mol_type = other RNA
atgctcccagcgcgccttttggccaaatttgttactattaacggcctcctgccccttggactgcctgagtcccctatcatttccaacctggtatgcctggacatggatcgggagctgcaggctatggccgatgagagggatctgcgttatacacggtacgctgacgatattaccttttccggttatgcaaaccttccctcaaaagaggatattaggcacttgctcacgggacagggcttccgcctatctgaccgcaagtttaggatcagcaagcggggtcaggcccacttcgtcacaggattgtccgtcagcgagcgcgattacccccatgtcccgcgagaaatgaagaggaagctgcgccaggaattgtatttctgtgaacgatttgggctagacgtacacgctatcgagcagggtgaaacctctcagaagacattcaataggctctacggccttgtcaattacgtgagttacgtagaaagaagacaggcagaccggctccatcagaaatggggcaggatcgtgcgtagagagctgggagaggctgcctacgctactgtgcagggccgggagtaccgagacatacacctgattgtggacgagagcgagtttaagatcggggaacaaaagtacttggccatatgcgtggtgaggctctctgaattagacagaaagcaaagagtggtgcggaagctgttactagattatgttacgaccctcggagcaaaaggggaaattgatgctttgaaagatgtgggagtgcatttcaccgaagtccattacgacctcagaacaaaaaccctggatctgatgctcgagatgttatggtctgcgagcgtccattttgccaaatatgagtcgggggaggactatgagttcacctggcttaagctgttcaaagaagcaatgcaccaggaactggttactgccgacgggatcggcctcgaggttctggtggaggaaaacgacaaggttagttccagtgccctgaagtcaattgtagacgcccagtaccaacacatggagcttgcgggctcacgacgtccacgcgtgaagcctgatgtcaagcgggtggggaaatcagatactccaatcctgactctgcccgacttcgtgctggccgcctttcgacataatgtgcttcaagtcgcagatgaaagagtgctggattttgaacggataagagacaaagttcgctatatccacgatcacgacttagacgcattctatacaaggaagaaacctttcgtcgaggtgggcagcgcttga

SEQ ID NO: 14275 - RNA, 1770 nt, synthetic construct
  source 1..1770: mol_type = other RNA
atggcgcgagatcctgtggcaccctttattgtcgacttccggaaggctaaagatactaaccaccttgcaactctgatcggatgccatgccgagatgctggaccgaatcaggaattccgccacacaccaagaattctatcgggaacacagaatcccaaaaaggaatcggagacgtcgtggcgagtaccgcgtggtgtggcaagcagtctccgagctcgcccaaattcagaaggccctcctaagaaagttcgaaaatttcgcacgcgacactgttgatgactatccgcatagtgctgtgcacggctatgtgacagggagaagcactctgacgaacgctcggtgtcatgctggagccaaaatcattgctagggccgacatcaaggactttttcccatcaatatctagagcacggttggaagcactccttactgagcttggcatctaccagtcagtggccgaggttatcggaggacttgcgacgatcgatgatggcctgggacaagggatacacacctcgcccttcttcgcgaatcttgtgtgtattccactcgaccaggagttgtctgatctggccggtaagtaccaagctatctatacccgatatgcagacgacctaacgtttagtagtgatacacgcgtgccggacagaattgccatcgaaacagtgctgcagactcatggcttccccctggccaaagataagtttcgaacaacaaaaattgggcaggcgcactttgtcactggactgagcgtttctgagctcgatcggcctaggattccatataagttcaagcataagttgaggcaggaactctattactcagaccgttttggaatcatgaaccacgctgagagagccgggtacaggttcccccaccactgcattaactcgatcgatgggcgcatatcctacctgcagggaatcgagcctgagctcggggtggaaatgagacagctctggaaaagccttctcaagcgagatggcttattctccacctacttgcctacctataaagagggcatgcgccagatatttaaggaggttgagggcgtatcatacttcattgatgagacagaaacccattttaggggcgatgtttatctgggtctagcattagtagccgtcgccaccggggatgtgtctaccattgaggaggctatagcacagacattggataggttcctgcatgacccctacgctagcggtaggaaggaaaagctgcagaagaaagggctacattttactgacgacagtgaagagatacgtaccgactttatcaaaactattgcccggttccccatcagagcctttgtggcctatcggaaactgtctgggatcaccagaaaggacgcctacctgtccctgctgaggattctggtcacagatcgcctcagcgacccattgcttaccctgaacagcacgatcatatacgaacagttgagcgaagtcccgcacaagtactttgagctcaccattcacgaagtaatgggcaagattaaggagcgcggtggcaaattctatcaggagccaaggattgtatgctgtggtaagcgggatcagccttgcatcgctatcgccgactacctgctgggtgtgttttcccactacgctacctccgagccccctaacgaaacccctaggaaacgcttcgaacgcctgcgggacaaaattcggttaatcgtcgacgctgacgagaaacgacgcttttggagaaataacccatttcccggcttctctgcaatggatggaacagaaaataatttagcgtga

SEQ ID NO: 14276 - RNA, 978 nt, synthetic construct
  source 1..978: mol_type = other RNA
atgaccaccgcaaagctgagggatctgaagtctatagacgatgttgcacgggcctgcggagtggaagccgactttatcgccgaatatgcccagagcgagtatcagagccatttctacaatttcctcaagctcccaaagcgcggcaagcggaggaaaggagagttccgcgttgtgttcgctgcgaaagaggaacgtttgcgggcgcttcacagatctatcagcatggtggtaacaaattccgctaagtttggcaaccacgtccaggggttcatgaaaaaaagaagtactagaaccaacgctgaacaacacttaggcgcgaaagtgctactgcatgctgacatcaaggggtttttcgactctattactaccaaacacgtccgcgatgcctttatttcggacggtacagacgttagcgtggccgagctgctagcctccgcttgtactattgacggcctgctgagacaggggaccagatgctcacccacaattgccaacttggtttgccatgatatggaccaggcatttcttaggttggcacgagctcatgactgtgtgtatacgaggtacgccgatgacattactttctccggcgagtccgtcccgagtgatgatgcagtccagcagattctcgaatcacgcggttttgaactgcgcgatgggaaatgttaccgccaataccggggtagatctcagtttgtaacgggactcacaatcgccgacaagagtgcccctaggctgcctaaggctttaaaacgacgtcttaggatgataatgcactatatagagaagttcggaatcgcagaccatttcaaacacgctggcgtgtttgatccctatagagaagaagcctggctccgagggatactgatttatgcacggtccatcgagccagagctggtggagaagtggcaagagatcctggataggtcaatctacgaccggagcgattacgatgagcccatcgacgacgattactga

SEQ ID NO: 14277 - RNA, 951 nt, synthetic construct
  source 1..951: mol_type = other RNA
atgaagtcgattgacgacgtggccagggcatgcggagtagaggcggacttcatctctgagtatgcccaaagtaaataccagaaagactactataacgccttgaagcttgccaagagaggcaagcgaagaaagggtgaattccggatcgtctttgccgcaaaggaaaaaagactgcgcgccctgcatcggtccatttccatgattgtgaccaattctactgagttcggaaaccacgtccagggcttcatgaagaaaaggagcactcgcactaatgccaagcaacacttagcagctaaaattctgttgcacgctgatattaagggcttttttgatgccatcaccacccagcacgttcgcgaagcactgatatctgagggagcggctgtccctgttgctgagctgctagctaacgtttgcaccatagacgggcttctacggcagggaacaaggtgttcacctacgatcgctaatctggtggggcatgacatggatcaggccctgctgaggctggctcgagccttcgactgcgtatacacgaggtacgcggatgacatcacattcagcggcgcctccgtaccaagtgatgacagcgtgcgtgaagttctcgaaagcagaggcttcgagcttcgggacgccaaatgttttcgccagtaccgtgggagaacacaatttgtgacaggtctgactgtggtggatgaaaccgctccaaggcttcccaaggggctcaaacgacgtttgcggttaatcatgcactacatagagaagtttggcatcgtggaccatttcaagagagtgggagtctcagatccctatcgggaggaggcatggctcaaaggtatcttgatgtatgcacgctccatcgaaccccagctggtggagaagtggcagaaagtcctcgatgacgcaattagtgaacatccgccttatgacgatctcattgatgacgattga

SEQ ID NO: 14278 - RNA, 993 nt, synthetic construct
  source 1..993: mol_type = other RNA
atgacaataagtaagctgcgggagctgaaaactatcgatgacgtggcccgagcctgtggcgttgaggcagatttcattacggaatacgcagagtccccggagcagagtacctattatgaagctctgaagctcagcaaaaagggcaaacgccgatctaatgaattcagaattgtctttgctgcgcatgaacagagactgaaacagctccacaggggcctttctatggtcgttgctaactctgccaatttcgggtggcacgtgcaaggttttgtgaaaggacgttccaccttgagtaacgccaaacagcacctgggcgcaaaagtgttgctccatgctgatatcaagtcattcttcgacgcaattactgtggatcaggtgcaagctgcctttgtcgagcatggtgtactggctcccatggcggaggttctagctaagttatgcacaattgacggtctactgaggcaggggacccggtgctcgcctatgatcgcaaatttagtctgtttcgatatggaccaggcctttcttaggctggccggggcaaccaacagcaattacacccgctacgccgacgacataacattttcaggagatagcgtgccctccgacgattcagtaagaactatcctcaagaatcgctcctttgaacttcgggacgggcggtgcttcagacagcatcgtggcagagtgcagttcgtaactggactgagcgtggctgacactacagcccccaggctcccaaagcgcctgaagcatcagcttcggttggtgatgtactttataaagaagcacggcctggacgatcacaacaattgggtgaagcaaggatataaatctcaccctgagatcacctggctctgggggatcttgaactacgcgaaaagcatcgaacctacgctggtcaaccaatggcagcaggtttatcagacagcctgggaggaacagcaagccaagcgaaaggagaggattaaggtcaaagattggaacccatga

SEQ ID NO: 14279 - RNA, 1041 nt, synthetic construct
  source 1..1041: mol_type = other RNA
atgtcaagcaacccgtacattaaaacccttttgtatccttcccgccgatgtaggccttacatgacgatagccaaattgaaggagctgaaaagcctggatgacgttgcccgagcttgcggagtggaattcgatttcatcgaggcctatagttccagccagaatcagaaatctttcttcaatgtgctgaagctgcccaaacatggtcgccgaagaaagggtgagtatcgcattgttttcgaagcccgggaacagcgtctagcagcctttcaccggtccattagcatgattgtgaccaactcagcggtgttcggggagcatgtgcagggcttcatgaagaaaagatccactcgtactaacgccgaaaagcacctggcagctaaggtcctgttgcatgccgatataaaggggttttttgacgccatcactaccgaacaggttagaaatgctttcgtgaccgagggggccgcagtaaggatggcagacgtattagctaaggcctgtacaattgatggactcctaagacagggaacccgctgctctcccacaatcgctaacttgatttgctttgacatggaccaaagtttccttcgtctggctcatagccacaactgcgtctatacaagatacgcagatgaccttactttttcgggcgatcaggtgccatctgatgacagcgtcaaggagatcctcgagagtaggggatttaagctccgcgatgatcaatgttacagacagtacaggggcaggtcacagtacgtgacaggcctcaccatcgcagacccaaatcagcctcggctgcccacacggcttaagaggagactccgcctcatgatgtattacatcgacaagcacggcttagctgaccactggaggaaagtaggggtcaatgacgtgatacaggaagaagcctggctgcggggcatgctgaaatacgcggggtcaattgagcctaaactggtcaaccaatggtggcaaatctttggtgaggcgtggtccaaccggacgtcttatgagcccatcccaggaaatgaagagcactga

SEQ ID NO: 14280 - RNA, 987 nt, synthetic construct
  source 1..987: mol_type = other RNA
atgacgactgccattctgaagaatttaaaaagcttggacgacgtagctcgagcgtgtggaatcgagcgggacttcattgaagcctactcaaattcactggaccaaaagagcttttacaacgtcttaaagatccggaagcgtggcagacgacgtaagggggaattccggatcgtttttgaagcccgggagggcaggttggcgagtttccacagggcactcagtatgattgtgaccaactcaaccgtctttggcgatcacgttcagggtttccttaaaaaacgctctacacggactaatgctgagaagcatctagcagctaacgtgctcctccatgccgatattaaagggttttttgacgctatcacgactgagcaggtgcgaaacgcacttgtggccgagggaaccgccttgcctatggcagacgtcctgtccaaagcgtgcaccatcgatggcctgctgaggcaagggactcgttgttctccaaccattgccaacctcgtttgcttcggcatggatcaggccttcctgcgcctttctcgatcccacaattgcgcatacacaaggtacgctgacgatctgagtttctccggggacgaagtgccatctgatgactccgtgagggagatactggaaagctgtggattcaagctccgccatgatcagtgctatcgccaatataagggtagaagccagtacgtgacaggcctgaccgtcgcagaccccaatagacctcggctaccgaaacgcctgaagcacaggctgaggttggtcatgtatcatatcgagaagcatgggctcacagatcactggaataaagtaggagtggatgaggccctgagagccgaggcttggcttagcggtatgctcagatacgccggatccatcgaaccccacttagtgagacagtggcagcagatatttgacaaagctcgctcgaacagagatccttataagcccctgccagactgtgatgaaggtcagggctga

SEQ ID NO: 14281 - RNA, 984 nt, synthetic construct
  source 1..984: mol_type = other RNA
atgactaaagcaaagcttaaggatctcaccaccctggatgatgtggcaagagcttgcggtatcgaacctgacttcattctcgggttcgtcaaaaacacaatccagaaggactatttctacgttgtgaagatggcaaagcggggacgccggaggaaaggcgaataccgcgtggtatttcaggccagagagaagcgcttatccgattttcatcgctccatcagtatgatcgtgagcaattctgcttgttttggcgaccacgtgcagggctttcgaaaaaaacattctgcccggacaaacgctgaacaccatctaggcgcggccatactgctccacgccgacattaagggattctttgatgctatcacgactgcacaggtcaaaaccgctttgatttcagaaggctccccgcctcctgtggccgagttaattgcgaaagcgtgtacaatcgatgggttccttcggcaagggacccgctgctcaccagtcctggcaaacctggtatgtgtggccatggaccagagctttctaagactggcccgtagtcacacctgcaattacacgaggtatgctgatgacttgactttctcgggagagagggttccctgtgacgaggccgttagggaaattctcgccgctgatggcttcgcacttcgtgatggaaagtgctaccgacagtttagagggaagacccaatacgtgacaggactgactgtcgcggatccaaacaggcctagactgccaaagcaactgaaacatgacctgaggacaacaatgtatttcattgagagacacgggcttgccgaccactgggagcgaataggtgaggagcatcccatgaagaaagaagcctggttgcagggcatgctgagatacgcctggagcatcgagcccaatctcgtccgcaggtggcagtatattctggaccgggctttcactgaacgggcaccctatatcatagacatcaccgatgaggactacggttga

SEQ ID NO: 14282 - RNA, 1104 nt, synthetic construct
  source 1..1104: mol_type = other RNA
atgatacagagtgcacttgctaccgtcgttgacttctctgggtacgtccgtggccgcgattctgcggtgaggtcattggagaacttcctgtatcccagcaccgtggctacagatatgacacaatcccggctgagcgaaatcagggatattggggacctcgcacgcgccactggaatacctaaagactttattgccgcctacgctaattctcaggcacagtccgatgcttactcagtcgtgctaattcctaagaaaggacgaaaaagaagaggccactttcgggctacgtttagcgccaaccaggagtggcttagtcagctgcacagaggcgtggccatgattgtactgaattccgtcgactttggagaacacgtgcagggatttatcaagaagcgttccatcaggactaatgcagagcatcatctgggcgccaaacagctccttcatgcagacatcagcaactttttcgactctatcaccactaaccagatcactcaaaatctcataacggtaggagcagccccagaagcagccagtttaattgccaagtcatgcaccatcgatggcctgctcagacagggcactaggtgcagcccgattctggcgaatctcgtgtgccggtctttggatgctgatatgatcagtctggcccagtccattggggctaagtataccaggtatgccgacgaccttactttctcaggtgatcagacaccctcaagcgacagtgttgacgccataatcacccagcacggtttcacactgagagatgggcggtgttacctgcaacaaaaaggccatcgccagtatgtgacaggtttaaccgtggcagacacagcccaaccccacctaccaaagcgcctgaaatctcggttgcgcctggttatgcattacattgaaagaaacggtgtccgagctcacttcgcccacgactgtaaacgacctatcgcccgaaacgcaaatgagctgtgggggatgttgaggttcgcgaagagcattgagccagatctcgcttcgacctggcttgaccagtggaaggcgggagagagaatcgattcctccaaggaacggcgcaggctcaaaaagctggctcgttggttatga

SEQ ID NO: 14283 - RNA, 972 nt, synthetic construct
  source 1..972: mol_type = other RNA
atgacccaaagtcgtctgagcgagctccacgacattgtggatctggcccgcgccactggagttcctgctgaatacatcgattcgtatgctaatgaggcaacccaagctgacgcataccatgtcctccgtatcccaaagaaaggccgaggacggcgaggacagttcagagtcgcattttccgctaaggaggagtggctagcccagctccacaggggtattgctatgattgtggtgaactcagtggagtttggtgaacacgtgcaaggcttcttaaagaagcgctccatcaagacaaacgccgcccagcatttaggagcgaagcagatactgcacgccgatatcagcaatttctttgacgctatcaccaccgaacttgtgtctgaatcactggtgacagtcggcgtcccccccaagatggcagttctgatcgcgaaaagctgcactattgatggcttgctgaggcagggtacacgatgtgggcctgccctcgccaacctggtttgtcggcctctggatgccgatatgttgagtctggcagctgccacaggagcgaaattcacgcgctacgctgacgatatcaccttctctggcgctctcctaccaacgggcgacagcgtaagggccatattgaataaacatggttttgcgttacgcgacgacaggtgctacattcaaagaaaggggagatcccagtatgtcaccggcctgactgtggtggacactgtacaaccccatctgccgaaaaggctcaaagctaggcttcggctcgtgatgcactatgtggctaagaacgggctgcaggcattgtttgcacagcaccatgatagacccatagcccagtcagaatccgagctgtgggggatgcttcggttcgccaattctgttgaacctgccctggccgcaaaatggtttgcccagtgggaggcgggggagcttgtagacgcacagagaggaccaaagcaggccgcatga

SEQ ID NO: 14284 - RNA, 999 nt, synthetic construct
  source 1..999: mol_type = other RNA
atgactaagactaagttagttgacttgaaaaccctggagcacgtagctcaagcttgcggagtgtctgccgaatttatcgttcaatacgcaaatgatcaacggcaaagagattactacttcaggataaaaatccctaagcgtgggaagaatagaaatcgccagtttcgcatcgtcttccaggcgaaggagtaccagctggcttcactgcatcgctctgtggcaatgataatcgccaattccgtgcagtttggtgaacaagtccagggcttcagaaaaaagaggtcttcccggtccaatgcacagcagcacttggccaaagccgtaatcctccacgctgatattaagagtttctttgattccatcaccacagaacaggtgcacgtggcgtttgtgtcacagggcgtgtcgaacgagatcgcccagctactggctaaggcatgcacaattgagggccttctcaggcagggtacccgctgtagcccaatcctagccaacttggtctgtgccgggctggataacaagctgctggcccttgcacatagctgccattccgtcttcacaaggtatgcagatgacctcactttcagtggcgatcaggtgccctctagcgccgcagttaagacgattgtcgagagcgaaggattcacactcagagacgacaagtgtaaactgcagcggcagggacggtgccagtatgttacaggtttaaccgtaagtgacggcaacatgccacgtctccctcgacgcctgaaatcaagactgcggttgattttccattacatcgagaagaatggactcaccgaacactggcaaaaaactgggcagaaaaacggccgaaggaaagagcagtggcttgacgggatgctgcaatatgctgctagcattgagcccgaccttgccaacaagtggcaggacattctgactaccgccaaagtgcagaaagctgccacggcgcgacagaagtattttgtggactgtgggatagatgatattgactga

SEQ ID NO: 14285 - RNA, 927 nt, synthetic construct
  source 1..927: mol_type = other RNA
atgacaaccaccaaactcttagacatccatgaccttgccgaactgagttatgccgtcggagtccgagcggagctgatcgaagagtatctgaccgcgcccaggcaggtagactactacgaggtaataagaatcgccaaacgcggccgcaacaggaaaggcgagtacagacaggtttacaaggctaagtcaaactggctgtcacaattgcacaggtctatcagcatgatcgtaaccaactcagtggagttcggagaacatgttcaggggttccttaatgggcgtagcacagttagtaacgcaaaactacacatgagaaaagatattgtggtccacgctgatatcaaggatttcttcaatgcaattactgaggcgcaggtgtgccagtccattatgtcgctcggatgtgcccagtttattgcctccataattgcccgggcatgtactatagacgggcggttactgcaggggactagatgtagccccgtgatctccaatgtcgtgtgcagaaacctagatctggacatgctggaactcgccagggctacgaagtctaccttcagccgctatgctgataatatcacgtttagtggtaaggctccgcctaacaaggagaacatcgaggccgtggtcaatgccaggggctttatactccaacccaagggatgctacgtgcagtatcggggctcccgccaattcgtgacaggtctgtctgtggttgatggcgttatgccacgattgcctaaacaagtcaagaagaaacttcggctgattgcatactacgtgaagaaatatggtgacggccacttcgagtttagcagtggaaatcactctattgcacctactcgtacacagctcgaagggtttatcgcttatgctcattccgtggaaccagaatttgccaagaaattgtggagcatggtgtcatga

SEQ ID NO: 14286 - RNA, 927 nt, synthetic construct
  source 1..927: mol_type = other RNA
atgaccacaacgcgtattgaggacgtgcacgatcttgctgagttaagcttcgctgtcggtgtcaaggccgaattgatcgaatcctacctgaacgccccttggcaggcccatcactatcagattatcaaaattgcaaagcgcggccgcaataggcaaggggagtaccggcaggtgtacaaggctaagaataaatggctcgctcagctgcacaggtccatcgctatgataatctcgaactctgtcgaattcggcgagcatgtgcaggggtttcttgctggtagaagcaccgtatccaacgccaagctgcacatgaagaaagacgtcatcgttcatgccgatatcaaggacttcttcaatgctatcactgaggtacaggtgtgccagagtatactggcactggggggaaacctactcatagcccagatccttgcccgggcttgtactattgacggatatctcttgcagggaacacgatgttcaccagtgctgtctaatattgtgtgcagacgactggattcagacatgctcgagctggcacgtaccaccaagagtacttttagtcggtacgcagataatattacattcagcggtatcacgccaccggcaccagagaatattgaggccgtgatcaacgggaacgggtttcagctgcaagcgaaaggctgctatgttcagtatagaggagccaggcagtttgttacaggcctatccgtggtggaccatgagcgccctaggttgcccaagaaaatgaaaaagaaactgcggctcatagcctactacattaaaaagcacggagatggccacttcgaatttccctctcgctctcacagcatcgcgcccaccagagcgcaattcgaaggctttattgcctatgcacatagcgtcgaacctcaattcgcaaagaaattatggtcaatgctgaactga

SEQ ID NO: 14287 - RNA, 927 nt, synthetic construct
  source 1..927: mol_type = other RNA
atgaccgctaccaagattgacgacattcatactctcgacgatctgagcttggtagtcggagtaaaagcgcagctgatacagcagtatgtccatgccccatgccaggctgactactaccagattatccgtatagctaagagaggaaaaggtcgaaggggcgaataccgggaggtttataaggccaaagagttttggctggcacaactccacaggtcaatcgcaatgatcattgctaattccgtgcagcacggccaacacgttcaggggtttgtgtatggccgctccacattaacaaacgcccagtaccacctactgaaaaagatcatcgtccatgcggatatcaaaaatttcttcaacgccatcacagagagtcaggtggaacaggcattcttgacgataggcgggcactcttctgtcgcgcatattttggcaagagtgagtactatcgacgggagactcctccagggtacccggtgctctcctgctgtgagtaacattgtgtgtagaaaccttgatcttcaaatgctggaggtcgccagggtaacctcgagcgtgtataccaggtatgccgacaatattactttctccggggacaagcccccctcctcaagcaatatcgaagccgtggtcaaaggctgtggctttgagctacaagggaaaggatgctatacacagcatcggggcgcccgccaatttgttaccggactgtcagtggttgatgatgaacggccacgcctgcccaagcagatgaaaaagaaacttcgtctgatcgctcactttgtgaagaagtacggtgacgagcacttcgagttttctgccgatagctcaagcatcgctcctacgcgaactcagttagagggactggtggcctacgcatactccatagaaccgcagttcgcaaagaagatttggagcatgattaactga

SEQ ID NO: 14288 - RNA, 927 nt, synthetic construct
  source 1..927: mol_type = other RNA
atgaccactacaaagattaaccaaatacattccctggaagaactaggctgcgccgttggggtaccagtgtcagatataaaaacctaccttaactcgaaccggcaagtctccttttatcgaaagctccgcatcccaaagagaggcaaagctagaaaaggcgagtacagagaagtctacaaggcgtcagaggcatgggtggcccagctacacagattgatggctctgattattcggaattcagtcgagttcgggctgcatgtccagggttttgtggacggcaggtctacaataagcaacgcgcggcagcacatgaaaaaagaggttattatgcacgcagaccttaaggacttctttaataccatcacggaggtgcaggtggcagaatacttcttggccattggagcccaccccgaaatggctcccgtgttcgccaggctgtgtacaatcgatggatacttgctccaaggcacgcgatgctcccctgcggtttccaatatcgtgtgtgaccgcctggacagcgatatgctccggctggcccgttcaacaagcagtgtgtttactcgctatgctgacaatctgactttcagcggcgataatccacctagtgccaaacagatcgaaggcctggtagaggccaacggatttaagatccgaggaaccgggtgctacagccaacatcgtgggtcccgcctcttcgttactggactcagcgtggtagatcaggaaaggcctaggcttcctaagcagatgaagaagaggctgcggctgattgcatattatgtcgggaagtatggtgaggatcatttcgagcactctgagcacgcacgctctatcgccccctctttaacccagttggaaggtctgcttgcttatgcatacagtgtggagccgcagtttgctagaaaaatctgggccatgttaaactga

SEQ ID NO: 14289 - RNA, 930 nt, synthetic construct
  source 1..930: mol_type = other RNA
atgaccagtgtgaagattgcggacattcaaactatagacgagctgtgtttggcaatcggtgctaatagagaggaggtgctccagtaccttcagagccctcgtcaggtggattactacgagctaatctgcattcccaagcggggcaaacgacgcaggggtgagtatcgagaggtgtataaagctaagtatcagtggatcgcacaggtccataggtcagtcgcaatgattatcaaaaacagcgcatcgtttcaagaatgcgtccagggtttcctggacgggcgttccacacttagcaacgccctccttcatatggggcaagaggttatagttcacgctgatatcaaggattttttcaatgccattaccgagttacaagtgaaggacgcctttagtgtcatgggagcttccttaattatcgctgacatcctggctaggatgtgtaccatcgatggctttctgagacagggcacgaggtgttcaccaggcattagcaatctggtatgcagacggttggacctggatatgcttggcctggccaattcaaagtcatctgtgtacagccggtacgcggacaacatcaccttctctggctgcagtcctccttcctacaacctgataaaggccgtggtggagaacaatgggttcgaactgcgcggatctggatgttacacccagtatcggggggccagacagttcgtgacaggcctctccgtggtagatgacaaaatgccccgcttgccgaaaaaaatgaagaagaaactccgcttgatagtttattatgtttctaagtacggggaagaacacttcgaagcctccgccggagcacacacaatcacacccactatgactcagctgctaggaatgattgcctacgcctatagcgtcgaaccagtatttgcaaagaaactctgggccaaactggctccatga

SEQ ID NO: 14290 - RNA, 936 nt, synthetic construct
  source 1..936: mol_type = other RNA
atgacaactcgacgccttaaggatatacactctgcacatgagctcgcccaggcagtgggtgtgagcgagtccaaaattctggattatgcggtatctgactgccaggagggtttctacgagaaacttgagatacctaaacgggggcgcaacaggaaaggagaattcagagaggtctataaagctaatcacaagtgggtcactcaactgcataggtccgttagcatgttagttgctaactccgcaagctttggaacccatgtgcaggggtttttaaaaggtagaagcacattgacgaatgcggaattgcatctcaggaaaagcctgattttgcacgctgacatcagaaacttctttaatgtgattaccgaaccccaagtggctaaggccttccttactatcggggccacccccgagatttctaaactgcttgcaaggatttctacgatcgatggatttttgcgccagggaacacggtgctcacctatcatctccaacctcgtctgtaagggactggaccaggccatgctcgatctcgcatcaactcacgactgcatgtacagtcgctacgctgataatatgacaatctcgggggccgagatccccgacattagtgcgattagcacaatagtgactaataacggctttgaactccgaggctcaggctgttatatacagcggagaggcagtcggcaatttgttaccgggctaagtgtggtagatagggaacgtccaagactgccgaagaagctgaagtcgaggctaagactggccgtgtactacgccagcaagtatggcaaggaacacttcgaacggtcacgccacgtcgacaccgtcaccccatcttgggcccagatgaaaggcatgatcgcctacgctcactccatcgagcctgacttcgccgagaagctgtggaagctgctgcgtcattcccgatga

SEQ ID NO: 14291 - RNA, 936 nt, synthetic construct
  source 1..936: mol_type = other RNA
atgacgaccagacgtcttaaagacatccacagtgtcgaggagctggctcaagcagtaggggtgtccgtggcaaagatattggaatatgccgtgagcggttcacaggaaggcttctacgagaagctggagattccaaaaagaggccgcaataggaaaggcgaatttcgagaggtttacaaggccagttataagtggattgcacaactccacaggtcggtgtccatgctggtgaccaactccgtctcattcgaaggacatgtgcaggggtttttgaaaggacgcagcacactgacaaacgccgagctgcatcttagaaagagcattatcttgcacgctgacatccgcaacttctttaatgtcataactgagtgtcaggtcgcaaaagctttccttactattggcgtaaagagtgaagttgcccaattattagccagggtgtgtacaattgatggctttctccggcagggtactcgctgctctccgatcatctcaaacctagtatgtaagtctctcgaccaagccatgctggatttggcttctacccacgactgcatatactcacgctacgctgacaatatgaccatctctggtgaacagatgcccgatattcgggtggttgcacagatcgtgaaggataatggcttcgaactgcgggatacaggatgctacacccagctcaggggagcgagacagtttgtgaccggacttagtgttgtcgatcgtgaaaagccacggctacctaagcagctgaagaggcggctgagactgattgtctattatgctagcaaatacgggcgagagcattttgaccggtccaggcaggtggacacgatagcccctagctggactcagatggaggggatgatcgcgtatgcccacagcatcgagcccgagttcgccaacaaactgtggaaaatcctccgaaaatccagatga

SEQ ID NO: 14292 - RNA, 1005 nt, synthetic construct
  source 1..1005: mol_type = other RNA
atggcccttacgcccttttccagaatcagacacgtcggagacttagctctacacctgggctgttcacccgaggaactgttgcactttgctaatacacaacctcagcggcagttctatgacctcctgcggattcctaagcgccggggtcgggacaaagttagaatcgtctaccgtgccaatgaggagagtctggcacgaatgcataagactttagccggcgaattggcgccacaggagggagaggatttcgatgagtgcgtgcaagggttcgttagggacagatctatagttaccaacgctcgcaagcatctgggctgcaaggtgttgctgcacgccgacatacaaaacttcttcgagtccattacactcgcccaggtgatgagcgtgtttgaaaccctgggatgtaattcgggtgtggcagctctgctgggccgcctatgcactctggacgggtttctcccacagggagcacatgctagtcccgcactcgccaacagagtatgccttcatctagataccgacctgaaacaattggccgcacgacacggctgtgtgtatacccggtacgcagatgacatcgctttttccggggatgaagtcccagagcctcagagggtcgaagccattctcaataagcatgggttcaaactgagggctgagaagtgtcgcatccagcgccgtggacactctcagttcgtgacaggacttagcgtcgccgatacccagggccccaggtatagcaggcaggccaagcgatggctgcgacttgtgctgcactacgcgagcagatatgggcttgaaaaccacttaaaacgtacgggtagggggtcagcaaacccgaaactcgcctacgcggaactcgagggcatggtacgctttttgcggtctgtggagccgaggacaactgaacggatgaaccctctgctcgctgagatcggtttcagactgcacgccgacgccagggaagaagctcatgagggcgaggatgaaaatggcgagccatga

SEQ ID NO: 14293 - RNA, 987 nt, synthetic construct
  source 1..987: mol_type = other RNA
atgaccggcgtagaatttccattcaagacaatccgggatgagcgggacttagcgcagcacctggaatgtgaagcgaacacactcctcttcctggccgacccaagcaggcaacatgagttttatgccgagctccgcattcctaaacgcaaaagaggcggatttagactggtgtaccgatcgcgagaggatgtcctctccagaattcataaggcactggctgttgcagtcgcagacgcagccaggttccgtccatgcgtgcaggggttcgtgaagaaacggagcattgtgactaacgctcgccagcaccttgggaagcagctgctcctccatgccgatatcgagcactttttcgaaagtatcagattgccttccgttatctcttgctttcaatctctggggtgtcgaccccaagtcgccgagcttttgggccggctgtgcacaaggaaggaagtcctacctcagggagcccatgcttcacccgtgctggcgaatattgcttgtagacacctggaccaggatttcgagcagctagctgaggtgcacgggtgtacttacacccgctacgctgatgatttgacttttagtggcgacgaagtacccgaggaaggtaatatccaaagtattctggccggctatggattcaagctgagggacggaaaatgcagaaggcagcagcggggcagaggacagttcgtgaccgggcttagcgtcggagatccggttggcccaagaatacctaagaaaatgaaacgccagctccgcagggacttacactacgccacccgatatgggttggaagaccatcttcgtcacgtgggtcggcctaccgtggatccgtgggaggaatattcagtgttagaaggccggacacgttacctggccagcgtagagcccaagatcgcctcagcaatgtggaaacaacttgttaggataagggcccagctggacaagtctgctgacacgggttccgaggaggcaccctcctga

SEQ ID NO: 14294 - RNA, 978 nt, synthetic construct
  source 1..978: mol_type = other RNA
atgtggatgagtcttagaaatttcgccttcgtgagaaacattcaagatctgagtagagagttaggatgtgaacgggcccagctggaggaatatatctcttctcgccagagggaattttacaaggaaatgagaatcccgaagaaaggtcggcggcggagggaattcagaacagtttacaagccttgcagggagttggctgtgctgcaaaaaaacatcgctactctgctgcagcgcaacccactcccggagtatgtccagggcttcgtgtcagatcgatcaatctacaaaaacgcgaagattcatatcggccagaagattctgctccacgctgatatccacgaattctttgagtccattaccctagaacgggtccgtgacgcatttgagacatgcgggagcaaccgggaggtggccacattgctggccaaactgtgtaccttagacgggtttctcccacaggggagctctgcttcaccagtgctcgctaatctcgtatgtcgccaccttgacaccgacattaatgccctcgcgataagctacgggtgcaggtattcaagatacgccgacgatataactctgtctggcgatcgcgttccccctgcagagagcgtcgagaatctgcttaagaggcacgcctttgagctgcgacctggatcttgccgtacccagcgtagaggccatggacagtatgtcacgggactgtccgtggaggacgcggtacctcgaattccacgcaggatgaaacgccggctccggttggttctgaggctagcccgctcggcaatgcaacatgcagaccttttgctgtccgagacaaagatcgatggttggctggcctttttccattccgtggaacccaaccttgccagcaaattaagcgctgagtgggatcccatacgagcaagattgaataataggcacactggctcccctgatgaccccagtgaagaagtgaccgaggaagagcccagtgactga

SEQ ID NO: 14295 - RNA, 924 nt, synthetic construct
  source 1..924: mol_type = other RNA
atgctgccgctacgcttctcagacctccgcagcgtgcaattggtctgcgcccacctccagacaactcctagggctctgcaaagtttcctgcgggaaccagaaagatactatacccccattgatctgccccaggctccaggtcgacgtccaaggagggtctttgaggttggggcccctctgcggagaatacatcgggtgctcgctgtggcgttagccccacacgttgacgcacagccatcctatatacagggattccgcagtggccgttcgatccgcagtaacgctgctatgcacgtagacgcggaggttgtagtgacagccgatatccgaggcttttttgacgaaattgatgtcgagcgggtgaccagcctgtttcaatccttaggcgccacttttcaggccgcaaccctgctggcaagactgacaacctttcaggggcaccttcctcagggcggacgagcatcaccggccattagcaacctcgcagtgcccgatctggataaagcattggtaagactaggtgggcgctgtgcatacacacggtatgccgacgacctgactttttcaggatctgcggctgcatgccctacggaagagcagatcagacgagtgctcgaatctagcggattccagttacgccccaggtccttccgccggcaactcaaagggagcggccagatcgtgaccgggctttctgtcgtgtctggctctcccacacttactagacggacgaggcgggagattgagcgtgccctgtacttcggcgctaggttcgggctttcctaccatgcctccagggccggtagtgaaaggagccctcagagagagttcgccagattgtgtggacacatcgctgctgccggaggcgtggataagaccctgcatgcgaagtgggttaagttgctggagtcagtcaatctctga

SEQ ID NO: 14296 - RNA, 969 nt, synthetic construct
  source 1..969: mol_type = other RNA
atggagcacgttaaattcgaccagatcaggaacgatgaggatctcgcacggaatttcgggtgtaaggtcaatgacctgagaagactgacagagggtgatcagcgactgctctatcttaccattcgaattccaaagagaggggctgcgagacggggtcagtaccgcatcgtgtacaaagcgctggaccaaactttgcgcctcttgcaaaaaaatcttgctagcagtatcgcagcccgggtgaccttcgctgatcatgtccaggggtttgtggctaggcgctctattgtcacaaacgccagaaggcacctcgctcgaaagtacgtgctgaccgccgacattgagaacttcttcgaatccatcacaatagaacgagtggcggctgcattcagaggattggggtgccacgaaggagtggcgcagacactggccaccttagccaccctgaatggccacctggtgcaaggctcatccgcatcacctgtcctagctaacctcgtatgcgaaggcatggacgccgacctattagccttgggtggttcgtacgattgtacttttacgcggtatgccgacgacattactctgagcggcgatgagcgcgtaccttccggggaagagatcgccgatgtcctggcaaggcacgcctttgttctgcgggacgggagggtgagggttttacgccgtggacgtcgccagtatgtgacgggcctgagtgtatttgatgccgaaagaccaaggatcccccgcgttcacaagagacggctgaggctgctccttcattacgccagcaagcatggcttggagaaacattttgagaggataggaatcgaacccgagaaccggtatcgggaactccggagaatggagggctggatacagttcatgaggtctgtggagccccgacgcgcagctgagtttgcagcccagcttgatgacgcccgtgctgctgacgcacgtggacttccgaagtga

SEQ ID NO: 14297 - RNA, 1005 nt, synthetic construct
  source 1..1005: mol_type = other RNA
atgatcgaattaaacttcaaagcgctcgaaaacatagaccatattgcccgagccgtgaattgcttcccctcttttataaacatcgtgcttgagcgcccttccctcttctatacgctgaagaagatccctaaacggggaaaaaggcaaaaaggtcagtatcgcattatttatgaggttgagtccgagctgaacattattcagaaaaacatctcaaccgctgtgaccagtaagcagcagttcccagagtatgtgcaaggctttgtcagcaagaggtctatcgctacaaatgccagtctccacctttcacagaaatatgtgctgaatctggatgtcaagaacttctttaactccattacccagaagcaggtgtcggatgtctttaaagagttggggtgcaccgagaagtcagccgaaatcttcacgaaactatgtacatttaacggacacctggtacagggcgcctccacaagtcccgtgcttgcgaatttggtgtgtaaagaactggaccaggacttcgcaggattagctcaacagtacaattgtagctactcccgatatgcagacgatatcacattttcaggcgatctgacccccagaaaaaaagacatcgagaagtgcctgaacaaatataagttcgagctgaatccagccaagtggaagcaccagaggagaggccgttctcaatacgtcactgggctaactgtttttgacaatactaagccaaggatccccaaattcataaagaagcaattgcggcagatcctctactacgccagcaagtacggttgggacaatcatcagtacaaggttaatagccataaccacaagaacatgtactatgatatcaagcggattgatgggctcatcgcatttatgtacagcgtagaacctgatagagcattcgagtttgacctgcaatggcagaaaattctgaaggaagaaggcattgtcgatgaacaggagcgggacccttacgctatattcgctcgccactctccggtgtga

SEQ ID NO: 14298 - RNA, 1023 nt, synthetic construct
  source 1..1023: mol_type = other RNA
atgatccaactcgacttccagagtctcgaggacatcgataccgtggccatggttctgggctgctttcctagttttatcaacaccgttatagatacaccatcaaggttctataccctgaaaaagattcctaaaaaggggaaagggcaaaaaggccagtatagactagtgtacgaagtggatagcgagctgaatgtcattcagaagaatatcgccacggccatcgcgagtaaaattcagtttcctgaatacgttcagggctttgtgaataagcgctcaatcgcaacaaacgccgcactgcacctgtctcagaagtacgtgcttaacctggacattaaaaacttcttcgattccataaaccagaagcagatcatagaggtctttaaagagataggatgtaccgagactattgccgagatctttgctcggctttgtactttcaatggccatttagtccagggtgcttccacttctcccatcttggctaacttggtttgcaaggaactagatcagaacttcgtagagctggcaaagaagtacaactgctcttattcaagatacgcggacgacattaccttctcgggagacataacccctcgtaagaaagagattgagaaatgtctcaagaaatacggcttcgagttgaatcccgtcaaatggaaaggacaaccacgaggtaaatctcaatatgtgacgggactgactgtgttcgataatacaaagccgaggattccacgggtaatcaagaagcagctcagacaaattctgtactatgccagcaaatacgggtggtccaatcacaagtacaaggtgagcatttgcattcagaagaacatgtattatgacatcaagcagatcgatgggatgattgcttttatgtattccgtggaacccgaacaggcccttaaatttgacttacagtggcagaagatactcaaggaacaggatatcgattacgtgaagggtcgggaccccaatgtcatcttcgcaaggcgcagccaagtacagacagacatcagcgaatga

SEQ ID NO: 14299 - RNA, 1023 nt, synthetic construct
  source 1..1023: mol_type = other RNA
atgattaatatcgatttcactacgattgaggagatttctcaaattgagatcgcattcgggtgtagcatcggctttatacagacagtcttagataaacctagcctcttttacgatcagctccagataccaaagaagggccgagggcagaaaggcaagtacaggatagtgtataaggtcgaagacgagctcaatctgctacagaagaacattgcaacggtgatcaatagcaaaatcagtttccccgagtatgtccagggattcgtgtcaaagcggagcattgccactaatgcctcgcttcatttgtccaaaaagtatgtgctgaacatcgacattaaagacttcttcgacacaatccatcaacagcaagtgtgtgaagtgttcaagaatctcggttgcgttgacaagattgcggacgtgtttgctcagctatgcactttcaatcagcacctggtccaaggcagttcaacatcacccgtgcttgcaaaccttgtgtgccaggaactcgatgaagccttcgtagatttggccaaacagtacaactgttcctattcacgatatgctgacgatatcacattctccggggaaaagaccccaggcaaaaaagagatcaagcgctgcctgaagaactacggatttgagctgaattctaacaagtggaaatcccaatctagagggaggagccagtatgtcaccggattgaccgtttttgacaccactatgccgagaattagtaagagcctgaaacgtatcctgcggcagatcctttactacgcctccaaatacggactggagaatcatttgaatagagtacacgactttaaccacaagaacatgaggtatgatatcaagaccatagacggtctgattgcctttatgtactccgttgagcctaacagagcattacagctggatatggagtggcagcgcatactcaacgctcaggaagccgaacaagcggagagctcttctcggaaaggcaagcgcaaccccgaagttatctttgctaggcggagtaaactgtga

SEQ ID NO: 14300 - RNA, 993 nt, synthetic construct
  source 1..993: mol_type = other RNA
atgaggaggattgagttttccgaaatccgcaatatagatgatctggcgaagtgtctatcttgtacaaatgaagacctgcgccggctggcttttgacgctacctctgccaaacattgccgtaaaatgctgatcccgaagaaaaacaaaagtggccacagaattgtctataagtcctttgataagtccctctcactgattcagaagaaccttgagacaactataaaccacaacgagattttcccagagtgcgtacagggcttcgtgcgaaaagggtgtattgccaagaacgcaggtaaacacttggcaaaacggtacgttttgaatgccgacattgaagatttcttcgaatcaatcggcatgctccagattgtgaatgcctttaaaagaatcgggtgcaatgatgatatcgctataatgctgagtaggctgtgcacactcgacgagcagcttgtacagggcttcagtacctctcccgtgatttcaaacctggtgtgtcatggcatggacgaggactttgtgacccttagcaagcagtacaattgcacttatacccgctacgccgacgacatgtcatttagcggaaatgccgtgcccacccagggagacatcgaggatatcttaagcaaccacgggttcaagctcaacaaaaaaaagttctttctgcaaaagcggggagacaagcaatacgttactggcttaacagtcttcgatgacaaatatcctcgaattcccaagaggatcaagaaaaagctcagattgacgctgtattacgctgataagtacgggctactgaaccatttcgaaaagatcggaatagattggagctttgtggactgggagatcaataaaatcgacggttggattgccttcatgttctccgtcgagccagcgttggcaaagaactttaaagctaagtggaacatcatccttgatgaacacaagaaaagcatgtcgtccgaatctggtgcatataatgtttttcctgagaattga

SEQ ID NO: 14301 - RNA, 957 nt, synthetic construct
  source 1..957: mol_type = other RNA
atgaagaaaataaagttctctaagatccgggatgtgaatgacctggcacgtagtttcggttgtagtaaagatgacttcaaaatcatcgagagcccaagcgaggccgtcagccactatagccgtatgttgatcccaaaaaagaacagaaagaacgctggctcataccgagtggtgtataaagttctcaaccctaaactacgcctgttgcagaaaaatatctccaccgctctggaatatgcatgctttttccccgaatacgtgcaaggatttgttaggggacgaagtattgctactaacgcaagacaccacttagcgaaaaagtgcatcctaaacctcgacatcaaggacttctttgaatccatctcccaggatcgggtaattcgggtattcgaacatattggatgcaattctgaaattgccagcatcttagcgaaagtgtgcaccataaacgggtatttgcctcaggggacatctagctccccaatcatagccaatctggtgtgtaaggatatggacgaagaacttaattctctggctatgtcctattctatcaactactcaaggtacgcagacgatatcactttttcgggtgatgcctgtccgcagagggaagagattgaggtgatactgggccgcaataattttcgcatgaacaacgagaagttcgtcatgatgaaacggggccagaatcagtacgtgacggggctgacagtctttgacgccgagagtcctcgcgtccctaggaagattaagaagcagctgagactgattctctactactcaaagaagtatggcattgaagatcatctcgagaggattttcgccgacaaggtcgggtgcccctacaaaaaggagtttgagaaaagaaagatcgagggttggattggattcctttgttcagttgagccccccctgggctataaacttaaagagcaatggctcgagatagtgaagtga

SEQ ID NO: 14302 - RNA, 1101 nt, synthetic construct
  source 1..1101: mol_type = other RNA
atgaagcatactgagcttagcaccaaaaaggatctcgccaactacctgcgctgtgacctgttgttcctggagaaagccattgaggatgattacttcattcgaaatatcgataccttcaatcaggaagacgtgttgctagctagtctaaccagcctcaataacaacatcatctccgtcgatcaattcaagctccggaagaaaggccacaatggcgggtttagaacagttcataagatatggaccctgcagctcaaaaattccctgaagattctcaacaatcacctgatccaaattttcacaccacttgacattgttcacggattcgtcaaagggaagaatatacgcagtaatgctgagtgccatctggccaagaagctcgtgctgtccgtcgatattaaggactactttgagacaattacggaaaaaatggtagaagaagctctgatctcgatcggctataatgaaaacatagccctgtggatcgcaaaaatcgtgaccattgacaatcatctcgtgcaggggttctgtacatcacccactctggccaacatagtgacaaatcagctggacaaagagcttaagaaactgtgcggcaagaaaatcacctacaccaggtatgctgacgacctttacttcagctcaaatacagaagagatcccactagaatccatcaagctgactattgagaagcacaattttctgctgaacgacaagaaaactaaatttatgaagcgtggccaaaagcagtatgttactggattaacgatcttcgattcatatatccctcggatttctaaaaaacggaagaaaaacattcgcctggagatcaactacatcgagagggtgggttatagatctcatactgtacacaagctcatcaaggagggtgaagatcccgatagcttggacttttactctaagcttggagaggagatcaaattgacccgaaacagattatatgggtggttgcactttatccagagtatagaacctcagtttgccaagaagtactataaaaagctcaacgacatagaccagaagtacattttgatggcgaaacttaacgcattaaaaaagaacgcaaggaactctgatatttga

SEQ ID NO: 14303 - RNA, 1086 nt, synthetic construct
  source 1..1086: mol_type = other RNA
atgaagcacacagaattatctacaaaacaagacttggcgaattatctccggtgtgatgtagcctttctagaaaaagcaatcgaggaggactatttcatccgaaatatggatacatttgacccggaggagattctgctttccagcctgaagagtaacatcagcgtttacagattcaaattgaagaagaaaggccagaatggcgggtatcgaaccgtgcacaggatttggactgcacagctcaataactcgctcaaaattttgaacgcctacttaactcagatcttccagcctctcgaaatcgttcacgggttcgtcaagggaaagaacattaaatccaacgcccagtcacacctagctaaaaagatcattctgtctgtggacattaaagattacttcgagactataaccgaggaaatggtcaagaacggtctgatgtccctgggttaccgcgaggatatcagcctgtggatcgccaaaataaccacgatcaacaaccaattagtccagggattctgcaccagcccaaccctcgcaaatattgtgacccataaactggataaagacctgaagaagctttgcgctaaggatgtgacatatacccggtacgccgacgatctgtatttcagttcagacactaaggaaattccccttgaaaacatcgcctcactgattgaaaagcactcttttgtgttgaacaacaagaagacaaagttcatgaaacgggggcagaagcagtatgtgacaggactgaccacttttgacagcaatatccccaggatctccaaacaaaggaaaaagaacattcgcttggagattaattacataaagaagttcggctacactgctcatgctaagcataggcttatcaaaagaggagaagatcctaatgggctcgacttttttaacaaagttggcgacgagatcacgctgacacgtaatagactgtatggctggcttcattttatacagtcaatcgagccacagttcaccaagaagtactacagaaagctgaatgatgtggacaaaaactctgtactaaattccagtctcaaggagatactgaaacagtttcgccaaaatatgtga

SEQ ID NO: 14304 - RNA, 1098 nt, synthetic construct
  source 1..1098: mol_type = other RNA
atgaaacactctgaacttattacaaagcaggatctggccaattacctacgttgtgacctcgagtttatagagaaaattatcgaggatgactacttcatccggaacctggatagacgcaatatcgaggagctccgaagcgccctgactagcaataaaatcctggtggatcggttcaatctgcgtaaaaagggacagaacggcgggtttcgcactgtccatcgagtctggactgctaaactcaataacactctgaagatactgaatcattacctcgtcaaaatacatcaaccttcagaaatggtgcacggttttgtgaaggggaagaatatcaggtccaacgcagaatgtcacttggaaaaaaaaatcgtgctttccgttgacatcaaggactacttcgaaacaatcacggagtcaatggtcaccaattctctcaagaagctgggctttaaggataacgtagctttgtggattgctaaaatcaccacaattgagaaccaactggtacagggtttctgcacctcccctacactggccaacattgttacacattctcttgatgaggaactcaagagtctatgcggctccaatatccggtattcaagatatgccgacgatctgtacttcagctccaacactgacatattgccccttgacgacattcagctggcagttgaaaaatacggctttctgctgaacgagaagaagacaaaattcatgaaaagggggcagaagcaattcgtgaccggcttaaccatcttcgattcacacagcccacggattagtaagaataggaagaaaaacatccgcctcgaaatcaactgcattacgaagtttggatacaccgcccacgcaaagcataggcttatcgcgagaggggaggacccaaaagatctaggctttttgagtaagctgggagacgaagtgaccaatactagaaaccgcctgtatggctggttacactttattcaaagcattgagccccagttcgcgaaaaagtattataagaaactgaacgacgtgggagagaattctgtgttgagatcgacccaggctttggagattctcttacagataagggccggtcagaaggaaagctga

SEQ ID NO: 14305 - RNA, 1029 nt, synthetic construct
  source 1..1029: mol_type = other RNA
atgaaacacaccgaaatcgagactagacagcagcttgcaaattacctgcgttgcaacattcattttctcgaaaaagccatcaataacgagttctttattcgcgacactaaaatcagcgaggacgtgatcccaaccattagcattccccctagtgaaataacggtcagcaagtactatataaagaaaaagggcaagaacggtggattccggattgtacaccatatctggacataccaattggagaattctctgaagatcctgaacaactatttgaacgagatcttcattccttttgattttatccatggattcgtgaaaggcaagaatatcaaaactaacgccgatactcatctggcgaaaaagataatcctatccgttgacatcgaaaactatttcgaatctatctccaaggagatgattattctcggcttatgcaaaatcgggtttaaagaggagatcgcagaatcaatagccagtatagtgaccattaatggcttcctgccccagggtttctgtacctctcccaccatcgctaatatagtgactcacgacctggatcagcagctgaagaaaatttgtggcacaaatattcagtacaccaggtatgctgatgacttatacttctccagcgatatagaaaatatcccgctcctggaaattaccaagatcatcgagatttatggattcattctgaacgagaacaaaacaaagtggatgaaaagagggcagctccaatacgtcacagggttgaccacgtttgactcgaacacatcacggatttccaaaaagaggaagaagaatatcaggcttgagatatattacctaactaagtttgggtttcggaagcacatcaagaacaaactcattaaatctggagagaatatcaacgctgaggacttcgagtacaagctgattgacgaaatcgataagacacgcaataatttgtttggttggcttcacttcattaagagtatcgaaccagaattttcagccaagtattacagcagactgaaaaaagcaaagcgatga

SEQ ID NO: 14306 - RNA, 1011 nt, synthetic construct
  source 1..1011: mol_type = other RNA
atggaacacaatgagatagatactctcaaagacttggcaaattatttgagatgcgatatcgaattcctggaaagcgctgtgtcatacgaatattacgtgaaagatgccggcgtggactttaaagactccataagcaagataatcgtgagtaagttcaatatcgccaaaaaaggaaagaccggtggttttaggaccgtttatcagtgctggagccattttctctcttcatccttgaagatcctgaataccaacctgaacgagatctttatccctaaccagttctcccacggattcgtaaaagggaagaatattcagacaaacgcttcctgtcacctggggaagaagttgcttctctccgtcgacatcaagaattactttgagagtattagcaaggatcgaatttgtaaatcgctggaaaaacttgggttcaaaaagcatgtcgcggagtggatcagtaacattacaactctgaacaaccacctgcctcagggatttgctacttctcccactctagccaacattgtcacccaagagctggataatgagctctcactcctctgcggcgacttaattacatattcgcgttacgccgacgatttatacttctccacgaatttagacgagatttctctggcagaaatcacctcaattatcgagaactacgggttcaacctgaactctaaaaagaccaagttcatgtctagaggaaaaaagcagtatgttacaggtctgacggtgtttgatgtaaaatatccacgcatcagtaagaggagaaagaagaatatacggctcgagatctactacctaagcaaattcggctataagcggcacatcaggaagaagcttataaagagcggcatgaatcccaaagatccagactttaagtctcatgttagcgtggaggccgacatcacacgcgataagctgtacggctggcttcattttattaacgcaattgaacccgacttcgctaaaaaatactatccgaaactgaaaaaggccaagcaatga

SEQ ID NO: 14307 - RNA, 1038 nt, synthetic construct
  source 1..1038: mol_type = other RNA
atgaagcactctgatttaagaaccataaatgacctggccaactatctgaggtgcgacgtcgctttcctggagagggccacttctaacgaattcgatgtgctcgacctagcaaatggtgataaacttaagcttagcccatccggagtcacagtaaccattgcgagaatcaaaaagaagggcaagaaaaccggctttcgaaaagtccacaagatatggaccgatgagtttaagaatagcctcaagatcctgaacaactatttacgagagatctatattcccaaagactgtgtgcaagggttcatcaagaatcgcagtatcaagactaatgccaacctccatctggggaaacgtctagtcctcagcgtggacataaagaacttcttcgaatccatcaagataaagatgatcgtttccggcctgacagaactgggattccagaagagcatagcagagtttatctcggagtttgtcactattgagggttccttggtgcaagggttctctacatcccccgttctggccaatatagtgtcaagtaaactggacttggaacttattaagttttgcggaaattccctgatttacagtaggtacgctgatgatctctacttctcgactgacgacaatgaaattgagttggacgcaattgaaaagattatcagcagccatggctttagcctgaaccatgacaaaacaaagttaatgaaacgtggacagttgcagtacgttaccgggctgacggtgttcgatagtgatagagctcgcatttctaaacagatcaaaaggaaccttagactggagatctattatatcaccaaatttggttaccggcggcacattcgcgtaaaactgaaaaaggagggctttgattcatcacttgagcacttccggctctttgtgaacgaggaaatcgaggctactatttcacggatttttggctggttgaacttcatccactctgtggaacctgacttcacagccaagtattacaagacgctgatcaagatcaaaccgaattactaccgcaaactcaactga

SEQ ID NO: 14308 - RNA, 1086 nt, synthetic construct
  source 1..1086: mol_type = other RNA
atgagtagctatcccatcatcagaattaactactacctcccgtaccctaatgcccatctctatatctttgacatgaacctgttggagattaacactaagaagcagtttctctatttgctccgctgtcgagagtccttcctgaatctgattaactccagggaatacgtgatcatcgattacactaagaacgaaaacgtggatgtcgaaatttctgaaggtaccatagttatcgaacgcttctacatcgaaaaacgaaatccaaccctggggtaccggaccatctttaaaagtcttaatttcgagctggactcttgccagaagattctgaactcacttctgctcgacgtgtatacgcctctagactgtgttcaaggcttcgttcagaagaagaatatcaaaaccaatgccagcgtgcaccttgccaaaaagcagatactgcggctggacattaaggacttctttgagacaattaccaaagagcagataatcgaatccttgatcaagttaggggtgaacattcagatcagcgagtggattagcaatattgcttgcgtcgaagaacgcttagtgcaaggattcagttcttcacccattctcgctaacattgtcgccagagagatggacctggatatcctaaagaatatcgactccaccatcaattacacacggtatgcggatgacctgtatttttcaagcaatctgtctaagcccaacctcgagcttatagtcgattccgtcataaaattcggctttaaaatcaactacgcaaagacgaaggtgatgaaaaggggacagaaacagtacgtgacaggactgacagtatttgatggcctctttcctaggataccaaagaaaattaaacgggagttaagactggaagcatattacatcggcaaatatgggtacgaggagcacatcattcacaagctgaaaatcaagaaacaccagctaaaggataaggagactcaaaggcttgtggtaaatgagattgatatcaccagacatcgtatatatggctggctgcatttcataaactcaattgagccagaattctcgaagaaaatcttgactgagttgaagaagtga

SEQ ID NO: 14309 - RNA, 1029 nt, synthetic construct
  source 1..1029: mol_type = other RNA
atggatttgctgcagattgaaacaaagaaggaatttctgtacttccttaggtgtagggaatcattcctggatagtgtcaatctccgggaatatgtgatcatagacaacaagaagaacaagaatgtggactttgaaattctagagaataccatcgctatagagagattctacattgaaaaacgcaatcctactctgggatacaggacaattcataactccttaaaccatgagctggaacactgtcagaaaaccctgaatactggcctgtcaaatatctacaaacccttaggatgcgtgcagggattcgtgctgaagaagaacatcaagacaaatgcctttgtccatctggctaaaaaacagatcctgacgctcgacatcaaagatttcttcgaaactatcacgcagaaacaaatcatagaatccctcactaagctgggcattaacatccaggtcagcgagtggatctcaaatatcgcctgcgttaatggctacttagttcagggcttttctacctcccccattttggcgaacatagtggccatagaaatggacctggagatatttaagaacatcgacgaaaccattaactatactcgctacgcagatgacctgtatttttcttcggattccactcaaatgtctctcgagctaatcaccaaaattatcacaaagtacgggttcgagatcaacaacagcaagaccaaactgatgaagagagggcagaaacaatatgtgacaggcttgagtgtatttgaccataactatcctcgcatcccaaaaaagattaaacgggagctccgactcgaggcatattacattggtaagtacggttacgaggagcacataatgcgaaaacttaaaatcaagaagcaccagcttaaacaccaggagattaaggggttgattatcaacgagatcgacaagacaagagatcggattttcgggtggcttcacttcattaatagcatcgagccaaattatagcaagaaaattacccaagagctcaagaagaccagtgccaatcgttga

SEQ ID NO: 14310 - RNA, 987 nt, synthetic construct
  source 1..987: mol_type = other RNA
atggagaatcgggattactacatcttcgaggagtattctgaagccgtggtcagtactgccatcaatataaaacggtttcacatccctaagaagaaccctgctctaggccatagaaccattcacaagcccttcaccggaaacctggaattttgcctcaagctgctgaatagtgagattagcaagctgttcgtccccggcatcgcagtgcacgggttcgttgccaaacggaacatccgatccaatgcctattcgcatctatccaggaaatatctgcttagcgttgacatcaagaactttttcgaatccataagttcaccccaaattgtggaaagccttgtcaagataggagtgaatcgtgacattgcggaatcagtgacctctgtggtgactatcaatggcctgttggtacaagggttttcaacgagcccaacattggctaaccttgtagctaaggaatttgacgatgatattcagatgttcgtgggtgctgatattacatacacccgctacgcagatgacctgtatttttccagtgatacatctttgcctgaggttgacaagatcgaagccattttaactcagtatggattctctctcaaccattccaaaactaagtacatgcctagaggcaaggcccagtacgttacaggcctctctgtattcgacaaagcttacccaagaattccaaaaaagatcaagaggaatgtgcgactcgagatccattacatcaaaaaagacgggttcaaagtgcacatcatcaagaaacacaagattgacgaagatcaggtcccaaaggatatcctcgacgcaataattgagttcgagacgtacaacataaaacagaacttgtttggttggttacgctttatcaacagcattgaaccggcatatgcgcagaaatatctggccgagctttcagagattgagagggccaacagcctggacaaggtcgagctgaatgagatcaaccccaatataaccctgtga

SEQ ID NO: 14311 - RNA, 1080 nt, synthetic construct
  source 1..1080: mol_type = other RNA
atggaaaaacataagctggtgaccttggttaccgccagcttctatatgaaggtgagtgatatcaataacctgaatctgttggctaattatctgaagctggacaaaaatctacttaagacgatttgcgagaacgactatataggcctgtccgccagagaaatactaaagtatcgcgcagataatagcgatctgacactggtcatcaagaagatcaagatctacaagaaaaacgggggcattaggacagtctacagtcccgtttccgactctgtaatcaactgcctcaaagtgctcaataaaaagctgtccaagatctatgtgccatctaaaaacgtgtttgggttcattaaggggaggagtgtgcagtccaatgcctcacagcacctgggaaaaaaatacgtgtataaggtcgatctcaaggactacttcgagtgtattaactctgacatgttggaaaaagcgttcatgcggctcggttttaataaggctgtgcttgattgcctttgtaaaatcgtaactatcaacaataccctcgcccaaggctttcacacctcaccaactttggcaaatattgtgttcatcgacttagacaatgtcttcagtaacatctcaaaaaacatcacttacaccaggtatgccgatgacctttacttctcctccgatgaagagttcgaaatacacgatttcattgtggagaatctgaaaaagtttggatttgaggtgaacgaaagcaagacccgtatgatgaaacgaggttctaaacaatatgttactggcctgacagtttttgaccctgactaccccagaatcgcaaaacggataaagaagaagattcgccaggagatttattacatcaagaagtacgggtacaagggacatgtaatgcataagctcaaggtgaaaaacaaggattacaagacaaacgaagatgtcaaaaacaaagtcgacttagctatttcagagttacagagcaaaattaacggctggctgctgtatatcaattcgatagagcctaagtttagcaaaaagtactctgagtttctctacaagaaaagcttcaaaccgattagcaacaattga

SEQ ID NO: 14312 - RNA, 1011 nt, synthetic construct
  source 1..1011: mol_type = other RNA
atgaagcctactgagataaatacaaccaagcgcttagtcaactacctaaaattagacgagatgagcttcaaattgatgaccaataacgattatgtggtgatcaacgatgtggagaacgaaattgaaattcccgatgctctgaagattaggaagctcaatatctctaagaagaacggggggaagagagtcgtgtacagttgccagtcagacgtattgagcaataccctgaagattctcaattccaatctgaactccctatataaaccaccaacctctgttcacggttatgtgaaaggccgcaatatcaagactaatgccactaagcatctcacaaaaaagtacgtcctcgtactggacatcgaaaactattttgatacggtgaaaagcagtcttgttgaacagtcctttaaagaccttggattcacaacagatactgcagcgtacttaacaaaactggtgaccttccaatcagccctggttcagggctttaatacctcaccgactattgccaatatcgtgttctatcccctggacaaaaagatggagaagctggataaaaacatcacatactcccgttacgccgatgacctctactttagctccgataaggaatttaacatagaggcaaaggtccaagagatcatttcggagttcgggtttcgaataaataaacccaagtctaagctgatgaaacgaggctggcaccagtacgtgaccggattgacggtgttcgacaaagaatcacctcggatatcgaagaaaactaagaggaaactgagacaacagatttactacatcaacaagttcggctataggtcttatgttctgtatgacctcgagaagacgccccaggactacttctccagctctagtcttcgggatgaagtcgacagtaagatcgagtacctccagcgcaaacttaacggttggctgctgttcatcaacagcatcgaaccaagatttgctaagaaatatagcgacttgctgacccatcggaaaattgagccttga

SEQ ID NO: 14313 - RNA, 1035 nt, synthetic construct
  source 1..1035: mol_type = other RNA
atgaaacagatcaactctagttacctgaatcactgctactttataatgagccacaagaaaattgacacggtgaagaagctgtcgaactttctcaacatcgaaaaagagatcctaagtgagttaagtaagaacgactacatcattatcgagcgcaacaattcatccactgacatcctcaataatgtccttacagttgaaaaaatcgagatccctaagaagtctggcggatttcgtgtggtgtacagccccagctctgataacctcacaaattgtcttaaggttctcaactcaaagcttagaaaaatttacgtcccatcaagctgcgtacatggatatatcaaaggaaggggcattaagaccaacgcatctgagcatttaggcaaacagtatattctgaaagtggatatagagaactacttcgagaagattaccaaagagaggattatcaagtccttgaacaatctgggctttcagaatgaaatctccagcctgatcgctaaaattactacccataacaacgttctggtgcaagggttccacacatctcctacactcgccaatataattttccacgagctggacttgatcttttctaagttcacgaatgcctcctatactcggtatgcggatgatctgtatttcagttccaaggaggagattgatattttgtcaaaagtggaagagcaattactaaagtttggtttcaccatcaacaagagcaagataaagctcatgaaaagagggcagaaacagtacgtgaccggtcttactgtcttcgacaataagaaaccgcgaatctccaagaataaaaaaaaggaaatccgccagcagatgcattacataaatcggtatgggtataaagggcatattatgcacgaatttggcatcagcaacgaagaatatttgaataacgacgagattaaggagaacgtagattacaagattcacgaactgaagacaaaaatcaaaggatggctgctgttcataaattccatcgaacccgaattctcgaagaagtacataaccctgaagtga

SEQ ID NO: 14314 - RNA, 1005 nt, synthetic construct
  source 1..1005: mol_type = other RNA
atgaaattagaagagatagtcaatatccagctgttggccaatcacctgaagattgaaaaagagtcccttcagttcattgtcgataacgactacatcactgagatcaccagtaagaaggactttaagaaaggctgtctgatcaacgagatcaagatcaagaaaaggagtaatggctatcgctatgtgtacagtccggtgtctgatattctggtgaacactctcaaaatcctctcaggaaaaatcaaggagctgtataagcccacggaatacgttcatggattcgttccaggccggaacacaaagaccaatgctcaggaacacctggcaaaaagagtggtctattgcgtggacatcgataagtacttcgaaaacatcgatattgagaaggtcaaatcagctattctttccatagggtataacgaatattgttctgacaagatctctaagatcgtaacacacaaaaaccagcttgttcagggttttcacaccagccctgtgatagccaacatcgttttccacgagattgacttgaaattatcccgtctcggggacgagaatgtgagttataccagatatgcggacgatctgtatttcagcacttctggccgcatcaactttgaaaaagatatagaggacatcctcaattcatacgggtttaaagtgaatagcaagaagaccaagtttatgattaggggtcgaagccaatttgtgacaggactgacagtctttgatgaaatgtaccctagaattcccaaaaagattaaaaggagcattcggcagaaaattcacttcatatctctgttcggataccggggccatgtgctacataaacttaacatcgagaagcagctgtacgatcaaaatgaggagattcaaaagcatgtagactcgaagatatacctagagaagctgaatatcgaagggtggctcaactacattaattccatcgaacccgacttctcaaagaagtgctacagcaaattgtccaaaaaggataacccatga

SEQ ID NO: 14315 - RNA, 1026 nt, synthetic construct
  source 1..1026: mol_type = other RNA
atgaatccacaaatcattacagatactaagcagttgtctaatgctcttagaattaacgaagagtcactcaatgaactgagccaaaacgaatacctcattgacgatacctgcgcaaagacattcaatctacatccagactctatcctgaatctgaagaaattctgcatcccaaaacggaataagaagttcggcgaaagggaagtgtatgagcccatagccgaaacccttaaaaacctgttaaaagtcacaaatagcgggttgaataaagtatacgtggcgcctacgagtgtccatgggtttgtaaaaggtaaaaacatcagaaccaacgcaaccccccacctggaaaagaaatacttactgtcgattgacattgagaacttctttgagagcatcaataaggagatggttatcaactgttttaaggagtatgagttcatagaatccatcgccaaagtgctcgccaatatcacaacagtggataataagctcatccagggattccatacaagtcctactatcgcaaacatgtactttaagaagatcgacctcattttcgaaactgtgtttccgaatctgacctatagtcgatatgccgacgacctgtcattcagctctaatgaggagataactgtgacccaggtcaccgacatcataaagattataaacgactttgggttctccatcaaccacgataagacgaagattatgaaacgaggacggaaccagtacgtgaccggcctgactatatttgatggaactttgccccgcgttcctaaacgcattaagcgcaagctgagacttcagatcttttacatcaacaagtatggctaccgtaaccatattctgaaaaagctaggtagaaaacctcacgagtactttaaaaactccagggttaaggagtcagtggatagctacgaggactatcttcacaacaatattgtcggctggctcatgtatattaaatccatcgaaccccagttcgctgctttacacctggagctgttgaacaatcggaggagggattga

SEQ ID NO: 14316 - RNA, 975 nt, synthetic construct
  source 1..975: mol_type = other RNA
atggatctgaaattgctgaatacactcatcgataatgaatacatcatcaacgactactgtagcggcgaagtcactttaaagttcgattttaccatcttggatgttgacaggttttgtatacccaagagaaataaggagctaggacacagggtgatatacaaaccaatgagcgaatccctgaagaattgcctgaagatcctcaacattaatctcaatggtatttacagccccccgatctcagccaccggctttatcaaaggacgtggcataaaatccaatgccgaaaagcatcttaagaagaagtatatcctgtccattgacatcaacaacttcttcgagacaatcaacaaggaaatggtaattgaggttcttaaagactatgggttcatcgaggagatagcactcaaaattagcaaaatcgtcactatcaacgacaaacttgtgcagggctttcatacatctcccactcttgctaacatgatattcaagaagatcgacttgattttcgaaaagctggacgaaaatattgagtatagtaggtacgcggacgacctcaccttctcctcagattctgagattacctacctctctaagataacagaaatcattgaatcgttcgggttcgagattaacaataagaagaccaagatcatgaagagaggacagaatcagtatgtgacggggctgacggtgtttgatgaacaatatccacgaattcctaagcggattaaaaaaaagctaagactggaggtctattacattaacaaatatggactgcggaaccacactttaaaaaagatgaaagtgaactggaaggatttctttggggatgagctgataaaaaaaaaggttgagaacatggagggtttggtccacgactacatctacggctggctggtgtttatcaatggtattgagcctgtgtttagtgaaaaatgctttgagctgatgcgcacccgcaaaatcgatgtatga

SEQ ID NO: 14317 - RNA, 1089 nt, synthetic construct
  source 1..1089: mol_type = other RNA
atgtatattccatccgagatcaataacgttaacaagttggccggcgtgctgaggtgtgaaatctcccagatagacaacctcgtgaacaaggtggtgcccagatccgaatttggcgaactgtttgagaaggtgcattttgatggcctgcccttccatttcgaggtgagtatgccagaggattttatactagagataaaactgcctaagcgtaaagtgcacctggggtatcgaaccgtttactctgtgttacctcacttcgccagctctgctctgaaagtgctcaagttttacttaaacgacctttatgtcccaaatgattgcgtgcatggattcattaagaaacggaatatcgtgacaaacgcacgcatgcacctgaataaaaagctcatactgaatgtcgacatcaagaacttcttcgagtcaatcaatctggatatggtcagaggggtttacgaaaagctgggtttccagaaggacattgccgaaatcctgtcaaatattacgacactaaatggacggctcgtcgcggggttcagcactagtcccgtgattgcaaacttgtactgtaatgagatggatgaagagttgatgcacgtatgctcacaaaacaatattacttacacgaggtatgctgacgatatcaccttttccggagacaaaattgacattctgagcgacgtcggagaaattctgaggcgctatgggtttgagatcaataagtcgaaaaccaggtactattacagaggtaacggtcagtatgtcacaggccttagcgtcgaggataccgttaaacctcgcgtaccgaaatacgtaaaaaaacgcttgcgtgccgagatttactccatctgtaagtacggcctcaagtctaacgttgcgcggatcttaggaatcgacgagggcggggtagacgaaactatgctcaaaaagcgagcagccaagatcattggctggctcagcttcatcagcagtatagagtacaagttcgctaaagattgctttgatcaccttcttagaatcgacaacgcccgggattcatattatatcatgaacgctctggaacatgtgagttctaagattaagaggttttga

SEQ ID NO: 14318 - RNA, 1014 nt, synthetic construct
  source 1..1014: mol_type = other RNA
atgtataaaccacaggacattagctctcctctgctcttctcaggctttctgcggtgtgcagaaaaagccatccctattctcaagtccaaaagcgagggggtgttagagatgaatatcccaaaacataatcccaagtatggctacagaaaggtatacaaggctacaagtcaattgctgtcttatactttgaagcagctgcactttgaacttagcaacctgtataagccacaatcttgcattggagggtttaccaggggcaggggcattctgtataacgccagtccacacataaacaagaaagtggtactgaatatcgacatcaaagattttttcgagtccattccttttgagctcatagtgtcgaccttcgttagatatggatttacgagtgaatttgccaatgatcttgcggagatcgtgacctataataaggtgctggtggccggcttcaatacaagccccatagtcgcgaacatgtgctgtgaggacatggatgcaaagctcttggctctttgttcagcccatcagatctcctacactcgctatgcagatgatttatctttctccggggaaagcatagagtgcgtcgaggacattaaagccatcatcgttcagtacggtttcattattaacgacaagaagacccggatttacagaaaggggggtcctcagtacgtcacagggctgactgttgtggatgaaaaatgtccccggataccccgccgcattaaacgagagttaagaagtgacatctactacatcgtgaaatacggactggaatcccacattaggtataaataccaccttgacatccatatcttcgataggtattacatgggtgacctctgcctcaacgaggctcggaaaatcgtcggatggatccatttcattaattcagtcgagccgatggtggctaagcgtctgaacgaaatgctgttcaacaagcgacacgaggatctaggctactttatcaatgcctatggatacatagaaaacttgacagacctaaagtga

SEQ ID NO: 14319 - RNA, 1092 nt, synthetic construct
  source 1..1092: mol_type = other RNA
atgtattcaccctcagcaatagagaacttcgaaatgttatcttcctatctgaggacaacacccgaccagctctctaaactggcccacgggcaaagactgatctttgactttaagtcggaaagtctgctagtgaacccaccagagataattatcagagaaaacgttaccgtgtttcggaagttttacatccccaagaaaaataagaagttgggctatagggtcgtgtataaagctcacaaacagttcgtgaaagacatccataagactctgaaattcaatctcaccaatatttacacccctcacacgtgtgtgcatggctttataccgggcaaaaatatccgcagtaatgcactcgtgcatcttgagaagaaacacttgcttagtctggatatcaagaactttttcgaaagcatcgataaaaagtccgtgtccgccgcgttcattagccttggcttcaacaaatctatcgcatctgacctgtctgtcatctgtacgttagaggataaactggtccagggtttccccacaagccctatcattgctaacatcgtttgcaccaaaatggacgaggaaattcagaatctgtgctgggtgtacggggccacttatagccggtatgcggatgacttgtccataagctccaattttgatatgccacctgtagaggaaatcgagcttattctgaaaagctttaacttcgagctgaacgctattaagactaagcgctttctgcgggggcagaatcagtacgttaccggactgtccatctctgactcagcctaccctaggatccccaaggccattaagaagcgcatcagacaacagctgtattacatacgaaaatacggataccactcacacatttgcaagataaagggactcgataaggagactgatctcagcataacaaagcagtacgtacgagagattgaaaacaagttgaagggttggatttcatacatccattccattgagccgttactagccgagaaatacttcgacattttcaacgaaattcagagtatcgagtatgctgaagtcatcaaactcctcaagagggacccacaaatcagacgtttcaagagcaaatga

SEQ ID NO: 14320 - RNA, 1068 nt, synthetic construct
  source 1..1068: mol_type = other RNA
atgtatcagcctaaggagatcgccaacttagatctgctgagcggttatcttagaacgcacaagcacgacctaaataatttcgtgagtggcgtccgggccgtctaccagcagaagtcaggcaagatctgcgtgtacaaccacattaagtcatggaaggatattgacgtgcaatatgataagtaccacatcccgaaaaagaatcctaagttgggatacagaatcgtgtatgagattcgaacactctccgcactcaatatcttaaaggtactcaagttcaatctctcgactctttacaaaccacatgtttccgtgcatggattcgtgctgggccgtggagtattctctaatgcgaaacaacatttagctaactactatctgctgagaaccgacatcaaaaacttcttcgagtctatcaacattgatatggtgtacgaagtcttcatagacctggggtttataccagaaatagccgaggtgctgagtaaaattaccacactcgacaaccacctggttcagggtttgcctacttctcccattatagcaaaccttgttctgaagaacatggacacagaactgaaaagcctgtgtaaaaagtacaatgctgtctataccaggtatgctgatgatatctccatcagctcaaattccgacttgccccccctgaaagagatcgagaacattgtcaataagtccaagttcaaattgaacaccaagaaaacaaagacctttaaacgcggccaaaatcagtttgtgactgggctaagcatttgtgataatctctatcctcgcatcccaaagaaaataaagaggaagattcggcaggagctctactacatcaaaaagtttgggtatgaatctcacatctgcaagaagtttgactttgacgaggaaaattacaacgaagatttcgtaagtgaagagaaacggaagcttgagtataggattaaagggtgggtggattacattcatagcatcgagcccaaagttgccgagaacttttataacgatctgaaagtgattcaggacaacgaaatcaaaaagatggacgaatacggcgacgcattttga

SEQ ID NO: 14321 - RNA, 1740 nt, synthetic construct
  source 1..1740: mol_type = other RNA
atgaatttgaatcagctcaacagtctcgatatcatcagcaaaagctttaacataccgctaaagttcctgcagagtattagtaagaacgagaagaacatcaagtacattgagttattcgacatcccaaagaaaaatcccaaaaggaccaagaaataccgagaggtaatcaagatcaattctccttacaatctcttctacaaagagctcctgcacatcatcgaacaagaaattgaacagaataaggccttcttcatttcgaacattgctcacggatttataaaagagcggggtgttttgaccaatgcaaaacaacatctgaacaagaaatacctgttcaagatagacatcaagaattacttcaagtccataacgaaggcaagtattaagtctgtctttctaaagctcagattttcagagaatggagccgagatctttagcgatctgtgtacattcgaagacgtgctctacgaaggcttcaatacgtctcccatcttagcgaatttatattgcctgaatctggacctggagttaaaatccctggctgatgaatataaggtaggcataagccggtattcagacgacattactttttcctccaacaacaacaactttccacccctgaaggccatccaagacatattcgacaagtacaactttaagatcaacgaggagaaaacaataagcttcaaatatggacaaccccagtatgttacaggactgagcatttcaaataacaagtatcctagggtcccaaagcgtatgaaaagaaagataagacaggaactctactacctaaataagtacccagagaattacttcaacatcgaagatggctatgcccgcctccgggctatttatggtaaaattgtgtacatcatcgggatagaaaagattctcggaaagcgttaccagagtgattttatcaacatccttgagaacaacaacatctatctcgagaatctgtacatggacgcaccccagaaaaaatctgggatgtgtacttatcattacattgacgaatctgagactccggataagaaaactctgattcttagtttggtgagcatcaatgggaactttctgaagaataccattttcaacaagctgaccttattgcagaatgacttggtttctgatctgcgcaacgggcttaccgataatcaaaaaagcaagcttttccactactgcgaggataatattaccgtgaaagagcggtatatctccattttgagagagctcaatatcgaagcccagattatgttcaaatcggaacaggaaagcatggacaaactgggtaaagaggtgtatcagaacaactattatgccctgtttaactccctgatgaaaaacattctccgaaggtacaagaataataccaacatgatcacagtcgaggaaaattcaaagatcagcctcgaaaaactgaaagaaatcgtgttgtccaaagggtcatttttccctaacactattatcgagaagtccggcaaagatgacatacttctgtcaattcctgattacattcttggcatcgtgagggactgtatggagaacaatttttccgagaagcttaacaagctaaaaacaggccagacgctgaaagagaacataaagcttaacgagatctctgataagattcgcctgattgctgacctgacaaacaatcagttctttactcagcagaataacaataagatggattgcctgaaattgaacgactatatccacaataagaccgaatga

SEQ ID NO: 14322 - RNA, 1749 nt, synthetic construct
  source 1..1749: mol_type = other RNA
atgaacctctactacctaaatagcctcgacattatttccaagtcatttaacacaccacttgagtttctcaattccatctttaactccgaagtgaacagcacatacattgagctgtttaacatccccaaaaaaaaccccaagcattccaagaaatatcgggaagttatcaacatcaagtctagctacaatctcttctataaggaactcctgtgtgtgatcgaacaaatcatcggtcagaacgagaaaaactttgtcagtgatattgcccacgggttcatcaaaaaccgtggcgtgtttaccaatgcgaaacaacatctaaataagaagtacctgttcaagatcgacataaaagactttttcaagagcattccccaagatgggatatccaacactttccttaaactgggctgttcacaggatggcgccaacctgctgagcacgttatcaactttcaatggcattctctacgagggatttaatacttcccccatcttagcaaacctgtattgctacaatttggacctggaactcattaaacttgccgatagttatgacgtcattgtgacacggtattcagatgacattacattctccagtgacacaaattcttttccttcgattgatgaaatcgagaaaatcctgaaacagtacttcttcaacataaaccatgagaaaaccctctacctcaaatatggtcagccacaatatgtaacggggctgtccatctctaatgataagtaccccagggtcccaaagcgtctgaagaagaaaataaggcagaatctgtattacatgaacaaatatccagagaactacttctataaggaagacaattatgctgtgctgagagctatctacggtcatatcgtatatctgctcggaattgaaaaatcgttagggaagaagtatcagagcgagttcatcaatatcatcgaaaactacctcaacctggaagacatctatatcaactctcctcagaagaagagcaccttgagtacttaccactatattgacgaatcagagttcatagattctaaaaccaacaagtactaccttattcttagtctgatttccataaacggcgagtttcaaaagaacatgatcagcgacaagattaatgctctgaagaatgatctggcctctgattttagaaatgggttgaacgacgaacagcgctcaaagctgtttcactactgtgaggataacatcagcgtgaaggaaaagtacattagcatcctgcgcgaattgaacattgaggcacacatcattttcaagtacgaagataaaccgatgaaaaagcaggactatcaggataattattacgccctcttcaatagtctcatgaagaatatactacggaggtacaagaacaatacaaatgtcatagtggttgaggagaatagtaaaatctccattaacaccttggagaaatcgatactgaatagacgattcttctttcctaatatcgagattgccaaagcttctaaagacgacgttcttctgtccatccctgattacatcctgggaattgtgagagactgcctgaaaaaggacttcttggagactttagagaaattaaaggcgggccagcgcctaaaggaggatataaagtttgacgagatcagcaacaagatacggctgatcgcaaaccttaacaactctaatttctttaccaggcagaataatagccagcttacctgcatcaagttgaatcagtatattcaccacaaacgaattttgggatcttga

SEQ ID NO: 14323 - RNA, 1719 nt, synthetic construct
  source 1..1719: mol_type = other RNA
atggatatcaggaaactgaattcgctggaggctattgctaagtcttttaataccgacattggatttctggaattcatgaaagagcctgaaaataccaagacgcagagcgactactttaaactacttaagctgaagaagaagaacaaaaagttctcaactagtttccgggaagtgcttaagatcaacgagcctttcaatgtgttttacaaggaactgctcaatgaactggagaagatcatctactcagactacaacaagtatatttctgaatacgctcatggatttcttcgcggcaaaaatatagtttcgaacagcaaagagcatcttaacaagtactatctctgtaaattcgacatcgaggattttttcgtgtccattaagaaggagagtatagagaaggtcttcataaaaattggctgcgagaaacaagccgccgaactatttagtaatctgtgcacttacgataatgctctcaaagaaggtttaaatacctcaccactgctggccaacttgttttgtcataaactcgatgctgatatccggagtagtatcgccaaaaacatcgtgtatacacggtatggcgatgacataaccttctcttctgacaaaaacaatttcatcaagacagacgatctgcaaaagatactgaataagtacaacctgaaactcaataagcaaaaaacactgtttgcaaaacagggacagccacagtatgttaccggtttaagcattagcaacagagagtatccgcgcgtccccaagaaattaaagcgaaaggtgcgacaaaaactctactacatgaacaagttctttgaaagcaattccgaagaggagctgctgaagagactctatggggagattgcctatattatagggatcgaaaaggacttgggcgagaaatacaaaaaaacgttccttgagatccttaaaaacaacaactgtacaattgacaacgcatctgcgaaaacttttaaggtcacaacggcaaaaaggattttccactacatagatgagtcagagatcatcattagcactgatgctgataagcagtatttagccatttgcgtggtgtccattatctccgactccgataaacagaaaaatattcagaagttgggggagctgaaaaacagctttttgatcgacgcaagggacgaatttataaaaaaagagggcctctttcactacactagtgataatcccgaagttaagatcaaggtccaggatctgcttagagaactagaatatgaggcgtttatcatcttcggcaaattcaataagaagattaccaaggaggaatatcaggagttgtattatgggctattctcaaagattttcaacaatatcctgctcaatagattcggtgatgccaataattacatttgctacgaagaaaactccaagatctctactaataagctgagctcctatttgtgcaacaaaaagcactctaccaagttcaagattgagaagatatccaaaaaggacattttgtccaccctgcccgactatgtactgggaacattttgtagcttagcaaaggaggagaagctccttgagaagatcgaaaatcagaagtacccttttgccctccgtaacctgaacaaaatcagctcaaagatccgcctgatcgtagacaacaacaacaaaatctactactctaggcagaacaaaaataaaaacgacttcctcgagattaacaagaacatcatgaattga

SEQ ID NO: 14324 - RNA, 912 nt, synthetic construct
  source 1..912: mol_type = other RNA
atggaatccctcaatttcaataagattcgcaacattgacgatctggccctgtactttcaatgtacaattgacacgctgaagaacatcatagagaacaaagagaactatagctctagaagacaaattccaaagaaaaatggcggaaagagaaggattatcatcatcaacaactttgattggtcacggtttttgaaacagattcacttttccatcgagaaacagtatccttacctcgactgtattgaaggattcttaaagagtaagagcatcaagactaatgcttctaagcacatcaataaccagtatttgttaactctcgacataaaggacttctacttttccattaagtacgaggatattatcaactcattcaaggcacttggggctaatgataccgtgtcagagatacttggtcaaatctgcacctacaataatctgctctaccccggctttaacacctcccccctaatctcaaacatcgccttcgagagtttggaccgcaaaatctgcgacctctgcaaagagaaagggataaactattctcgatacgccgatgatctgtccttcagcagcaccaatccaattgagatcttgccgataattaaacagtatctgtctgagaaagcgtttgaaatcaacgaatacaaactgcggttctctaagcatggccaggcacagtatgtcactggtctaagcattagcgataagacaatgccacgtcttcctaggaaatttaagcggaatatcaggctcctgctgcactacgctaaaatgaatgggattgaaaactaccacaaacatcccaagagtcgacacctgctgacaatatacggacagatcatgtatagttattcgattgaacctcatttcgccttcaaatgtcttaagatcttcaatgacatcaagaagtga

SEQ ID NO: 14325 - RNA, 909 nt, synthetic construct
  source 1..909: mol_type = other RNA
atgcttcttctggactttcccaatatccgccacaaaggtgacttgataaagtacttccagacaaacacggaaacattcgattcagtcctggtttccaaaaataaatttgcccacgtgattaacatccccaagaagaagggaggcaatagagaggttatcaagctcaccaacgaagattggaagaggtttttgaaacagattaacttcagcctgcaccagctatacacctttcctaactgcgtccagggcttcattccaggacgaggtataaaatctaactcttacttccacctcaagaatcggcagctccttgtgtgtgacatcaaggacttttactatagcattaaggaatccgacataagcaacatctttaagtacttcaaggcttcagatgaaatcgcaaacttactcgccaaactttgcacgttcgagggcattttattccccgggttgaatacctcccctactctggcgaatctgtattgtgagaagatggacgagaaactgagcatactaatgactagccatcaaggggtctacacaaggtatgccgatgatcttactttttcgagtaaccagaccctccccaacctgaaagacatctctgagctcctggaaaattataactttaagttgcaggagcgtaagacccgatatagttccccaggccaacggcaatatgtgacagggctgtcaatcagtgataagagggtgccaagactgccgaggaatttcaaaagaaacatcagactgctagtacatctcgcagaaaaattgggcgtgaaagagtaccacgagaatttaaattctcgcaacctgttcactctcaagggacagctggtatttgctatgcatattgagcctattttcgccaaaaagtacctggtgcgcctgaatcggctgatctga

SEQ ID NO: 14326 - RNA, 939 nt, synthetic construct
  source 1..939: mol_type = other RNA
atgatcaagttagatttctctaagttccaagacgagacaacgatctctactaacttccacatcctaaaaaagaatctggacgatctcctgaccggcaaccaggaggacttttacgaagtgttacatatcccaaaggctaataaaagtctgggataccggaaggtgtataaacccaattggaagattgacggcttgcacaaatacattctggagcagatcaattttaagagcaaacctcttattcacgattgtgctcatgggttcataaaggggaaatctatcctcacaaacgcacagcagcacctcaataaaaaatacctgctgcaggtcgacattaagagcttctttagctcaatctcccaggatgaggttaagcgggtgtttattaagctgggctgcaacgattatgtagcggagctgttcagtatcctttgtaccatcaataacagcctggccgaaggactgaatacatcgccgactattgctaacatctacttcttcgaactcgacgaaattctgaatgaaatctcccgacgctatagttgcacctacacaagatatgccgacgaccttacttttagctcaaacaactatttcgactatacggagttgctcaaagagatcgaggatgccctggaaaagaagaatctgacccttaacaacaagaaaactaggttctccaagtatggtcaggcacaatatgtgaccggcttgtcaatatccaatgaggtcagacctcgcatacccaagaaaataaagaaaagactacggcaagagttttactttattaagaagtacggcttcaacgcacacttttctaggtgcaaccagaacattaaaaatgggcataataggctgaacggatggttactctacgccctcaatgttgaaccagattattttcgtaagctttacgccgaatacaaaggtttgaaatga

SEQ ID NO: 14327 - RNA, 1668 nt, synthetic construct
  source 1..1668: mol_type = other RNA
atgaaccaggtcgtggatttctcgggcctgagcaacttgcggtccatagcctcaacctttaataccaagctggagtttctcgaatccatcctgaagtcccccacccgctctgagttctaccaaaaaatgttcatcctaaagaagaacggaaagggctaccgattagtgtacaaagccatcaataaatcactgtctctctttcacaaaaaccttagcacaagtctccagaagctggaaaaagagtttgtacatgattgcgcatatgggtttgtgaaagggaaatcaacatttgacaatgccaagattcatctgaatcggcaaatattggttcagttcgacattgaaaactttttcaagtccatcaactacgagaatatcaagaagattttcttccaactgtgcaagaacgatgatatcgcttccatcctgacatctctgactacagtaaatactagcttggttgagggacttcacaccagcccagtgctggcaaaccttttcttctatgacctggacatacaattattcgaacttgcgcagaaacacgactgcctctatacccgttatgccgacgacatcacattctccactaacttcaaggatatcaacgttaagaagttagaaaaggaagtgtcggccatcctcaaagagtccaatctgagtctgaataacgagaaaactcgcatctctaagaaagggcagcctcagtacgtgacgggcctcagcgtcagtaaccctgaatttccccgaatcccgagactgatgaagaagaaaattcggcaggaactctactatattaagaagtatggtgcagaggatcatttcatgaacaagaaggagaaactgtatgatggcatgcagaggctgaacggatggatcatttattgtcatgcgattgagaaagagctcgctaagaagtttcaagatcagatattgatgacggacgcttatactgacattcatgagtacaataagagactaaggaagaaagagaaaagaaaagaagagctgcacctgtactttgatgaaactctctacgaaaattacttcggcatgtcatgcgtgttgatccaggacgagaatcaccaggatattagcaatgaccttaacaccttttacgaccaattgtcaggtgatcagctgataccaaagaaaggtaggattttccattactgtgaggacagtcacgatgtcaggggacaaattgtggaccgcctgaggaagtgtgattttcaggcctacatcgtgttttctaaactggaaaccaatagctacacaaaagatgactacctgaagatcttctataaggtcttattcgatcggatccacaaaaattatgattgcactgtgcacatttactacgaggagaataacaagatcaaaaccgctgatattgatgacctagtcgaagacatcaaagataagcttaataaccagacaagtatggtgatatctataaacatccagaagattaccaagcagaatcatctcagcgtgattcccgactatgttcttgggttgtttaaagacgcctacctcaaaaaagagagaaaggactttgaaattcgctattgtcagaaactatccaacaagataagactcgtaatcgacctggacacgaataaatattattcacgtcaccagacccttagcttatctaacgagtga

SEQ ID NO: 14328 - RNA, 984 nt, synthetic construct
  source 1..984: mol_type = other RNA
atgttgattaagttctctgagatcgagaacctgactatgctcagccaatttctgtacatcaaagaagacaacctactgacactgttgaaggaaggcgctgttagcagctgttgcgaaaagatggccatacctaagaaaaaccgggccttagggtatcgggtagtgtataaagttaactctcacctcctgaaaaatgtgcataaggtcctgtgcggtcatcttaatgccgtctatgatgcccctgcgtttgtgcacgggtttgtgcttggcggatgtacaagaagaaatgctgcacagcatctgaataaaaaaaagatcctgggcttagacatcgatagattcttcgacagtattagtgagaacgcgattaaggaagtgttttgcggcctggggtgtaggatgaatatcgcagccaatctgtcaaagctaacaaccatcaatggtcgacttccacagggtttcaatacgagccccgtattggctaacataatgtttggacacctagatgcccaactgaactctatttgtaacgactatgggtgcatatatacacgctacgctgacgacattactatttccaccgatgaccagcttcctccagtcgctcgcatcaacgacgtgcttttcactggcggcttccgcttaaattcatccaaggaaagggtaatgtttagaggcaaaaaacagtacgtgaccggactgaccgtgttcgatccagagtatcccagggttccgaagcgttttaagcggcggattcgactccagttgtactatctggtgaaattcggagcaaagtcctacgtgatgcgtgaactcggtctgtccgaggaagatgtccgcaacgattatgagaaactgcaactcgtctcgggaaggaaggtgcagctccagtaccagatcaaagggtggatagactacgttaattctatcgagcccctcttgtcagagaagtactacgagagttacaacgcaatcgcctggtga

SEQ ID NO: 14329 - RNA, 972 nt, synthetic construct
  source 1..972: mol_type = other RNA
atgagtttctccgtggatcaactagctgagcaagtgggaacttccgtggagaacctcgaatttctgagcgagcatctgccagcaggggaaggactgctgtacgtgcagcggcggcacaggaaaaagcatggaggcatacgtgaagtgttcgagcccaaacccccttttaatgccgtctccaaaaaccttcacagaagctttaccagccagtttagttacgaggccccagaccacgtgcacggatttgtccgcggtcgatccaccatttctaacgcgagtcagcatctggctaagaagtgcgttttgagaatggaccttgaagacttctttcctagtatcggcgcagcaacgattagggctagcctaagagagcagggcttcgacgagaaagccgccgaactggctgttagcctcgtaaccatcggcggcaagctgccgattgggctctctactagccccttgctcagcaacctggcctttttggatacggatcgatcactggccgcctatgccaggtcagagggcttatcattcacacggtatgtggacgacctcacattctctggggacgttactgataggcactcgaccgacatcgcacgaattctggacgatgctggatggtctgtcaatactcggaagacagccttcatgaggagaggggggccacagtatgttaccggcctttacgtcggcgagtcagatgggccccatatccctcgcgcgttaaagagaaaaatgcggtggatcctgcatgtcatatccaagttcggatacgaagcgtacatgacagattttggtggtgagaatgaaggcatgtatcgctgtaggcttctgggttgggcatgctatatcgctgccgtggaacgtgacgtggggttctccctccttcgcgagttcgatcgcttagtacctgagggatctgatgaggaattgcacggctacgacgaagacctgtacgatctcctgtga

SEQ ID NO: 14330 - RNA, 963 nt, synthetic construct
  source 1..963: mol_type = other RNA
atggcattctccgtcgaccacctcgccgaacaggctttcctttcagtgaaagatctcgagtggcttagcgctcatcttccggctggggaaggcactttttacgttcagaggcgccaccgcaagaaacatggaggtattagagaagtctttgaactgaaaccacctttcgacaccgtctccaagaatttgcacagaagcttcacctcgcgtttctcttacgaggcaccagcacatgtacatgggtttgttcgcgggcggtctaccatctcaaacgccagtcagcacctagccaagaggtgcgtgttacgtatggatctggaggacttcttcccaagcataggggccgcggcaatccacgatttgctcagggagcagggatatgaggagaaagccgcagaactggccgttaatctggtgactattggcggaaagctacccattgggctgtcaacatctccactgttatcaaacctcgcttttctgtccacggatcggagcttagccgagtatgcccgctccgaaggactcagctttacacgctacgtggatgacctgacttttagtggcgacgtcaccgataggcatagcatggacatcgctaggattctggatgacgcggggtggtccgtgaacacacggaaaacagtgttcatgcggagaggcggcccccaatatgtgaccggactgtacgtgggcgagagtagtggtccccgaatcccccgaaaggtgaaaagaaagatgaggtggatactccacgtaatctctaagtttggatacgctgcctacatgacggactttggcggtgaaggcgatgagatgttccgaagacggctgcttggttgggcgtgttatattgcagccgtcgagcctgacgtgggataccctttgctgagagctttcgacgaattggttgatgaagaagatctggagggggacgaggagggcctctatgacctgccttga

SEQ ID NO: 14331 - RNA, 924 nt, synthetic construct
  source 1..924: mol_type = other RNA
atgccatatagcgtacacgatctggcacagcaggcaggcgtgagcgtggaagtgctcgagagactgtcgtccatgttaccggcaggagccggccaactctatgtccagcggatctaccgtaaaaagcacggcggaattagggaaattttcaagcctaagcccccttttgatgccatcggcaaaaatttgcatcgaagtttcacctccctgttctcatacgaggctccagatcacgtgcacggttttgttagggggcggtctactatatcaaacgcaagccagcatctggctaaagggtgcgtcctacgcatggatctggaggacttcttcccatctatcgacgccgctaccatcaaggcttctttacaggagagaggatatgaagagaaggccgctgactttgccgtgaacctcgtaacaatcgggggaaaactcccaattgggttgagcacatcccccctgctgagcaatctgatctttctgagtaccgaccggagcctagctgaatacgcgcagagtgagggactttccttcacacgctacgtggatgaccttgcgttcagtggagacgtgaccgatcgccactctgcagacattgcccgcatacttgatgacgccggctggtcagtgaacacacggaaaaccgcatttatgagaaggggcgggccccaatatgttactggactttacgtcggtgagtccgatggtccgcggattccccgaaaggtcaaaagaaagatgcgttggattctgcatgccatctcaaagttcggttacgaaacgtatatgactgagtttgggggcgaggacgagggcatgagaaggaggcgcttgctcggctgggcttgctacatagccgaagtggaacccgacgtcggctatcctctgttgcgaggttgtgttgggtggccttgggccgggtga

SEQ ID NO: 14332 - RNA, 1011 nt, synthetic construct
  source 1..1011: mol_type = other RNA
atgatcgcgctgacctgggaatgtgatcctatatccaggaggcctgcagcagaagggccagtggagttcagcgtcaataacctcgcggagcaagcgggcgtctctgttcggaacctggagtggctgtgctccaatctgcccacaggagccggaaggctgtacgtaagaagaacgaaccgcaagaagcatggtggtgtccgcgaggtgtttgagcctcagtttccattcgatgtcgtgtccaaaaatttaaaccggagttttacttcactcttctcatacgaagccccttctcacgtgcacggcttcgtgagagaacggtctacaattagtaatgctagccagcaccttgccaaaaaatgtgttctccggatggacctcgaggatttctttcctagcattgacgcagccacacttaaagcctccctcagggggcagggctacgaagagaaggctgccgagttcgctgtgaagcttgtgaccataggcggtaaactcccagtgggactgagtacttcccccttattgagtaacctagtgttcttggggaccgacagaagccttgctgaatacgcccagtcagaaagcctgtcgtttacgagatatgtggatgatctgattttctctggcgacgttaccgaccgccattccgccgatatcgctcgaatcctggacgacgctggatggagcgtcaatacccggaagacagtatttatgaggcgaggcgggccgcagtatgtgactggactgtatgtcggcgagtcagacgggccgcgtatacccagaaaggttaaacggaagatgcgctggattttacacgttatctctgaatttgggtacgacgtgtatatggaagaattcggcggagaggatgagggaatgcatcgtcgccgactcctggggtgggcatgctacatcgctgccgtcgagcccggtgtaggctttccactgttgcaagcattcgatgaactggtgcccgagagggccgaggaggatctatatgacttgccatga

SEQ ID NO: 14333 - RNA, 939 nt, synthetic construct
  source 1..939: mol_type = other RNA
atggtggatgatctggccgagcaggccggcgtgtctgttgagatcctagaagccctctctagcgcactccccgctggtgcagggaggttgtacgaccagcgaatatacagaaaaaaacatggagggatccgagaggttttcaatcctcggcagccactggctacaatatccaaaaaccttcaccggtctttccttcatctatttagttatgatccaccaaaccacgtccacggtttcgtgaggggccgctcaactgtcagcaatgccgggcaacacctggcaaagccctgcgttttgagaatggacttagaagacttcttcccgagtattggcgcggctaccatcaaggcgacccttggcgaacagggatacgaagagaaggccgcagatattgcagtaaatctggtaaccatcggaggaaaactgccgattggcttaagcacttcccctttgctgtcaaacctggcatttctgtccaccgacaggtctttagccgagtatgcccagagtgaaggtctgagctttacgcggtacgtggacgatctcacattttcgggggatgtgacggaccggcatagcgtggacattgcgcagatcctcgacgatgctggctggtccgtgaacactcgtaagacagccttcatgcgcagaggagggccccaatatgtcaccgggctgtatgtaggagagtcaggcggccctcgtatacccaggcaggtgaagcgcaaaatgagatggattctccacgttatttccaagtttggctactacacatacatgtcagagttcggaggcgctaatgaagtcatgctgcgccggagattgctcgggtgggcttgttacatcgccgctgtggagcctgatgtgggttatcccctcctgagggcctttgacgagctggtcccagaacctgatgaggacatctatgacctgctttga

SEQ ID NO: 14334 - RNA, 960 nt, synthetic construct
  source 1..960: mol_type = other RNA
atgccttactccatcgacaatttagcagaacaggctggagtatcggttgaactgctagagcatctcagtagctcccttcctgccggggctggacgtctgtatgtgcaaagggttcatagaaaaaggcacggcggagtgcgcgaaatcttcaagccgcgaatggactttcagttcgtaaacaagaacctccatcggagcttcatcggcctgcttccgtacgaagctccagatcacgtccacgggtttgttcgagaacgctctgccgtctcaaatgctaggcagcacctcgccaaagcatgtgtgttaagaatggatctggaggacttctttccaagcattcgggctgagacagtcaaggtaagcctgatggagcaaggctacgaagacaaagccgctggagtggccgtcaacttagtgacaatcgggggcaagctgcccatcggcttgtctacttcccccttcctcagtaatctggcgtttctcgacactgaccggtccctggcagagtacgctaagtcagaggggttgtcttttacccgctatgtggatgatctggcattttctggtgatgtcacagatcggcatgccgttgacgtggcccggatactagatgacgccggctggagtgtcaacacgcggaaaactgcgtttatgagaaggggtgggccccagtacgtcaccggtctgtatgtgggtgagagcgatggaccccgaattccaagaagagtgaaacgtaagatgcgctgggtgctgcacgtgatttccaagttcggatatgatgcatatatgatggagttcggcggctcaggggagggaatgacaaggcgcagactcatgggctgggcctgctacattgcggccgtggaacctgaggtggggttccctctgctgagggagttggatgcacttgttccagacgaggacgaagaggaccttgactacttggaaataaccacctga

SEQ ID NO: 14335 - RNA, 951 nt, synthetic construct
  source 1..951: mol_type = other RNA
atgccatatagtgtcgaagatctggcacagcaggccgacgtttctacagagatcctggagtggttgtcctcagaaattccgacagggtttggcagactttacgagcaacgtatataccgaaagcggcacggaggtgtgagggaggtcttcaagcccaaacgccccttcgataccgtgtctaaaaatctatatcggagtttcacgaggctgttttcttatacggcccccgaccatgttcacgggtttgtgcgcgagcgatccactattactaacgcgtcccaacatttggcaaaaaagtgtgttctgaggatggacttagaggatttcttcccttctatcggagccgctactgttcagacaattctgagagaacagggttacgagggcaaagtagccgatctcaccacctcactcgtgaccattgggggcaagctccctatcggcctgtcaaccagcccactcatgagcaacctagccttcctgacaactgatcatagcctggccgaatacgcgcagtccgaaggcttgagcttcacacggtatgtcgacgacctcactttttcgggtgacgtgacagaccgccacgctacagatatagctcgtatcctggatgaagccggatggagtgtgaatacgagaaaaaccgtgtttatgcggcggggaggtccacagtacgtaaccgggctttatgtgggcgaatccgacggaccaagaatccctcggaagctcaagaggaagatgaggtggatccttcacgtgatctcaaccttcggatacgatacttatatggcagagttcggcggccgcgaagaggggatgcgaagaagaaggttgcttggctgggcttgctacattgccgcagtcgaacccgacgtcgggtttcctttactgcgcaaatttgacgagctggtgagcgagggggatgctgaatactgggacgaggagtattga

SEQ ID NO: 14336 - RNA, 963 nt, synthetic construct
  source 1..963: mol_type = other RNA
atgccttacagcgtagatgacctggccgagcaggcgggagtatcagtggagatgcttgaaaggctttccagtactctccccgcgggtgcaggtcgactgtacttccagagaagatttcggaagaaacatggcggtgttcgcgaggtttttaaacctatgagtccctttgatgccgtcagcaagaacctccacaggtcattcacagggttattttcttacaaggcacccgaccacgtgcatggctttgtgcggggcagaagtgtcatctccaatgccagccagcacctggctaaagggtgcgtgttgcggatggacctggaagacttctttccatccattggcgccgcggcagtgaagtcggccttatgcgaggaggggtatgaggagaaggccgctgacctggctgtcaacctggtcaccattggaggcaagctgcctatcggactctccacttcaccattgcttagcaatttagctttcctggccacagatagatctctggccgagtacgctaggtccgaggggctctcattcactcgctatgtggacgacctcacgttcagcggtgacgatgttaccgatcaccatgcagttaatatagcccggatccttgatgatgctgggtggtctgtgaatacaagaaaaaccgctttcatgaggagagggggtccacagtatgtgaccggcttgtatgttggcgaaagcgacggccctcggattccgcgaaacctgaaacgcaagatgaggtggatcctgcacgtagtctctaactttggctatgatgtgtacatggcagaattcggagggcgtcgagaaggaatgcgtcgccgcaggcttctaggatgggcctgttacatagctgccgtggagccggacgtcggatacccattgctgcgggcattcgacgaactggtgcccgaggatgaagaggaggaagaagaagggctatatggcctccaatga

SEQ ID NO: 14337 - RNA, 954 nt, synthetic construct
  source 1..954: mol_type = other RNA
atgcctttttccgtagacgacctggcagagcatgctggcgtctctgccgaggccttacagaaactatcctccagcctgccaactggtgctggacgcctttatttccagagaacgttccggaaaaagcatggaggcatcagggaggtgatcaaaccggcatcaccatttgatgcgatctccaagaatctcaataggtcattcaccaccctgcttccttacaaggcccccgagcacgtgcacggattcgttcgcggccggagtgtcgtatctaatgctagtcagcacctggccaaagagtgtgtgctccggatggaccttgaagacttcttcccaagtattagcgcgaccacagtcaaggcactgctccaggaccaaggctacgaggaaaaggcagccgatattgctgtgagcttagtgaccatcggaggccggttgcctataggcctgtcgactagtccctttctatctaaccttgcattcttaagcacagatcgatccttgagcgactacgctagaagcgaggacctcagctttacgcgctatgtggatgatctgactttttcgggtgagataaccgatagacattctgaaaacattggaagaatcctcgatgacactgggtggtccgtcaacacacgtaaaaccgccttcatgaggaggggggggccgcaatatgttactggtctgtacgtcggcgaatcaggacggccacgtataccccgaaaaatcaagcgaagaatgcgctggattctgcacatgatctcaaagtttggctacgatacatacatgtctgactttggtggggaaaacgaagaaatgtatcgcaataggctgatggggtgggcctgctacattgccgcggttgagcccgacctgggctatcctctcctgagggccttcgacgagttggtgcccgaagggtattacgagacagctgtgtgggatttgggatga

SEQ ID NO: 14338 - RNA, 993 nt, synthetic construct
  source 1..993: mol_type = other RNA
atgcctttcagtgtggaagatttggctcagcatgctggggtatccgcggaggtcttagaagtcctctcctcagcactacctctcggcgaaggaccactttaccgggcctggacatccagaaagaagcacggtggcatacgcgaggtcttcaaacccctgtcacccttcgacgcaataacaaaaaacctacataggtctttcacggatctgttaccttacaaggctcctgaccacgtacacggctttgtgaggggccgtagtactattaccaacgccagccagcatttagggaaggcatgcgtgctgcgagtagatctggaggacttctatcccagcatccgagccgcaatggtcaaggcctcacttcaagctcagggctacggtgagaaagccgccgatgtggcggtgggaatcgtgacaattgcaggcaagctgccagtggggatctctacctctccctttctcagcaacctggttttttgggacacggaccggtccttggcagaatacgcccagcgggagggactcagctttacacggtacgtggacgacttgaccttctctggcatggtcgtggatcgccaccttgcagagatcactagaattctggacgatgctgggtggtcggtgaacacccggaagactgcctttatgaggagaggtggcccccagtatgtgaccggattgtacgtcggcgaagctgacggacctaggatcccgcgcaaagccaaacgtagaatgcgctggatcctgcacaagattagcaaatttggctacgagacttatatggaagattttggtggagaggaccaagttatgtatcgaaataggctgcttgggtgggcttgttatattgctgccgttgagccagatctggggttcgacctgctcagaaagttcgatgatctgattccggaaggttattacagtaatggatatgccgacatggcggggctcctgcatgttataaatgatatcgacgatctcccatga

SEQ ID NO: 14339 - RNA, 1029 nt, synthetic construct
  source 1..1029: mol_type = other RNA
atgactctcgtgttgaccgccgacattctcatcggtgccatagggtacccaacgagggtgctggaagaactcgcactgatgttgagaggcggcggactgcaggtctttagcctgcaaagtcaccggaagagacgtgggggtgtgagggagatcgttaagccccggccacttctggattctgtgtcgaaaaacctttacagaagcctcctagagctgctgccctacaggcccccagaccatgtgcatggcttcgtccgcggcagaagcaccctaaccaatgcccgcgcccacctcggcaaaccatgcgttctgagagttgatcttgaggacttttttccttcaattagttctacaaccctgcagggagctctggaccagcagggctgtgatgagaaggcggccgaattagtggtatccctcgccacggttttccagcggctgcctatcggtctgtctacatcacctttcctgtctaacgtcgtctttctgagcacagattatgctttatccgaatacgcccgcgctaacaatttgtccttcacacggtatgtcgacgacctcgcattttccggagacgtgaatgaccagcacttcgaagctatcagtgagattctgaacaacagtgggtggtcaatcaatgtcgataaaaccgcttttatgaggcggggcggtaggcagtacgtgactgggttgtatgtgggaatggcggatcgtcccagagtaccgagatctttacgacgcgagatgcggcgaactttccatcttatcgaaaagtttggatacgaatgctatatggaggacttcgggggagaggccgcagcgatgttccctcaacgcctacgtggctgggcccgatatattgcaagcatcgaaccggacctggggtatccattgttgaggcgcattgatgagcttgtacccgatcaatatgtgtccgctagggacctggaggcctactacgattacggcgagtaccaggtgatagagagcgcagaagatctctatggatcagaggggcctgactactga

SEQ ID NO: 14340 - RNA, 960 nt, synthetic construct
  source 1..960: mol_type = other RNA
atggccaccttttctgtggacgacctggcacagcatgccggaactgatgtggagcgactcgaagagctgtcaagaggggtgttactgggcaacggcctgctgtttgagagcagatcacatagaaagcgtagggggggaattcgcgaaatcgtcaagcctaacccctggctggacagtattacaaagagtctgaaccggagttttttgcaggttctgccctatctaccaccggatcacgttcatgggtttgtgcggagccggtcaaccattacaaatgcgacagctcacctgggcaagaaatgtgtgctgcgagtggaccttgaggattttttcccttccatcggatctcgctgggtcaattccttgttgcagcaacagggttacgatgagaaggctgcaagcctctgcgttggtcttacaacgatcgcaggaaaactgcctattggcctgtccacctcaccgttcttgagtaatcttgccttccaggaaactgacagcgctctggccgaatttagcgccactgaggggttatctttcaccaggtacgtggacgatcttgtattctctggcgacgtcactgatgaacacctctcggccatcgaggggatcatttccaatgacggttggttaataaacctgcggaaaacggctttcatgcgccgtggtggacctcagtatgtcaccggcctctacgtgggtgggagcgatatgccaaggattccccgagaaatgaagaggtatatgagatggacactccacataatacgcaaattcggctatgaatcctatatggccgactttggcggggaagcgtctgatatgcggcctcaacgcctactcggatgggccagatacatcaccgcagtagagcccgagtttggcaggccccttctgggagctttcttcgagttgatcccactcgattactgtggcccagatgactgcgaggacatctactga

SEQ ID NO: 14341 - RNA, 969 nt, synthetic construct
  source 1..969: mol_type = other RNA
atgtcattcagtgtggaagacctgggtcagcactccggggttagcgtgcggatcctcgagagtctgtctgaagatctacctgcaggcgctggaaaattgtttagagcccagtccttcagaaagaagcggggcggacttcgcgagataattaagcccaacccatggctcgacctcattacaaagaatctgcggcgatcatttttggcagtactgccataccgccccccggatcacgtccatggcttcgtgaacggaaggtcaacagtcactaatgcctcagcacatctggggcgagcttgcgtgctgagagtggatctcgaagattttttcccttctatcggcagcgcccagttaaaagcggccctccaggaacaggggtatgatgataaagccgcatccctggctgtctctatcgttaccattggtggaaagttgcccatcggtctgtcgacctccccctttctcagtaatctggctttccagcatacagatcatatcttagcagagtatgccgaggccgctggacttagcttcacccggtatgtagatgacctggtgttctccggcgaagtgagcgaccagcacctagcagccattgagaggatccttaacgacagcggctggtctattaaccagcataagaccgcttttatgcgcagggggggccctcaatacgtgacaggattatatgtcggagcaactgaccacccccgcatcccacgtaaaactaaaaggcacatgcgttgggtgttgcacattattacgaagtttgggtatgacgagtacatggcggagttcgggggcgaaaatgctgacatgcttcctcaaaggctgctgggttgggcctgttacatagcggctgccgagcccgatgttgggtacccactgctcagagccttgaacgagcaactgccacctgcctacgtcccgcctaatggctggctgatcggcatagaagaccttgactga

SEQ ID NO: 14342 - RNA, 999 nt, synthetic construct
  source 1..999: mol_type = other RNA
atggccatcttttctgtcgaggacctggcgcaacatgctggggtcagtacccagacactggaagagctcgctgagagtctcccctcaggagcaggcacattgtatagccggctcacttttcctaaaaagcgaggcggctttagggaagtggtcagcccaaggaaaactctcgatgtggtgaccaagaaccttcacagatccttcctggacgtgttcagatacagaccccccgagcacgtgcatggctttgttaagggtaggtcaactatttctaatgcctcggagcacctgggacgcacttgcgtattaagggtcgacctgaaatcatttttccctagcattgactccacaagactgaaggccgccttcttggagagggtctacgatgaaaaggcagccgaattgtgtgttagagtcgtcacgattagcgataagctgcctgttggggtttctacatctccattccttagtaacctggtgtttcgagctaccgattatgctttgcttgactatgcacgcgcagaaggcctcggactgacccgttacgtggacgacctgtcattcagtggcgaagttgaggatagacacctttctgacattaccagaatcctagaggatctgggatggcgggtaaatactcgcaaaacagctttcatgcggcgaggaggtccccagtacgtaaccggactgtatgtgggggcacctgatcgtccacggatcccgaggaagacgaaacggcgtatgcggtggatcctccacgtgatttcccgcttcgggtatgagacgtacatgacagagtttggcgggctagaagctggcatgatccctcagcgattactcgggtggagctgctacgtggccagcgtggaaccggacgtgggtttcccattatttcgcgccttcagggagatccttccagaatcctataccccaccctcctactacgcgggcgagatagccggtatacggatcatacatgagctggacgatctgcgctga

SEQ ID NO: 14343 - RNA, 999 nt, synthetic construct
  source 1..999: mol_type = other RNA
atggtgactatcgaggatctgtcagagtatgcgggtacaagtgtagccaaattggaaaagctggccgatagactcagagagcgcgtggatttctcgacgcatgtgtacacgacctataataggggacgccgagaaattgtggccccagctacagcactggacactgtcaccaagaacttgcatcgcagcttcgtggcagaactgccctacaatcctcctctccacgtgcacggcttcgttaagggacgctccccgttgaccaacgcagcccagcacctggacaaagcttgcgtccttcgtgtcgatttgcgcgaatttttcccaagcatcaattctgaccgagtgggaactgctctccaaactcagggtttccaaaccgacgccttagagctgtgcacccgcatagtgactattaacggcaggctgccaatcgggctctccacatcccccctcatcagcaacatcgtcttcgaacctaccgactacaccctcgcctcttactgcgaatatgaggggcttgagtttacaagatacgtggacgacatgattttttcaggcgacgtggctgatcggaatctcggtgatattaaagagatcctgttagcagatggttggctagtcaacgacagaaagaccgtctttatgaggaggggagggccgcagtacgtaacagggctttttgttggatgtgctgataggccaaggatacccagacgtataaagagacagatgaggcgggtttgttatctgatcgaacagttcggctaccagagctatatggaggactttggcggagacgatgcaagaatgattccaaatcggttatatggctgggcccggtatatcgcgagtattgagccttctgtggggtaccctatgctgcggctgctgtcagagcatgttcccgaaaaaaacgcccacagtcttgatcagacacgattcgatcacattggcataactgtaccccggatcgtggagtccctggacgacctactgtga

SEQ ID NO: 14344 - RNA, 1014 nt, synthetic construct
  source 1..1014: mol_type = other RNA
atgctcgtgtctctgaaaagaatcgcttctgtcgctggctcttcggaaagcgagctccgtcaactcgccgacgaagttgaggaaggccagcactttcacgtgtatcgggctcggctgagacgccgcgatagaagcatctattggcccgacacaccctatgacactgcactgaaacagattaggcctgccctggagagactgctttcatacgaggccccacaacatgtgtacggtttcgtgaagagaagaagtaccagacagaatgccgctaatcacctggatgcagactgcgtgctaacaatcgacctggctgacttctttgcctctattaagagagaggcagtgatcggagcgctgggtgacagcggagccgataaggatgccagcgaggtaattggcaggctcactaccccacggggcgttttgggaatggggctgtccacaagcccgtatctgtccaatcttgtgttcctccgaacggacgacgaattggcatcattagcgacttccctggatattcgctttacacggtacgttgatgacctgacattctccggagccatagatgacaaaaaagcggagcatataaaggctgtattgatcagcaacgggtggactgtgaacgaccggaaaacccgcttcatgagacgaggacgtgcccagtatgtgacagggctgtccgtcagtgatgctgtcgcccctcgtgcacctaggcggcttaagcgacggatgaggtggaggttaaacatgatcgagcgctacggtttttacacctacgttactaggtttagtgggggctctgtggatagtatgttgcatgaagctgaaaggttgagggggcttgcacagtatatcgcctccgtcgagcccaaccttcgctcaggctggctggaacggtggtaccgagctgtcccaaccacctcacaccgattcgataatgagggcgacaccacgcgcttaattaagctagatgaagacgacataaggcgcctcctcgaggatgaggcccagtga

SEQ ID NO: 14345 - RNA, 963 nt, synthetic construct
  source 1..963: mol_type = other RNA
atgattccggtgacccccaccgtcctcgccaaaagacttggccactctgtgcccacattagagaatctggcacagatcgttcagtcaggtccaagtgatgatagctacaggctagtgcgcggagacagggaacttcgagtgcctactccccaactgaaggtggaactgctccccgtcgcggagtacctgagagcctctcttccgaggcctgcggagcatgtccacgggttcgtcaagaaaaagtcaattctaactaacgccaaagagcatctcggcgccccagtggtactgcggctcgatctgcgtaatttcttcgcaagcatccagtctgatatggtccatgctgccctgacgaaacacgcgtccttcaccgacgacgcggcacatctcctcgttgcagtttgcgtccctgagggccgattacctttgggattttccacttctcctgccttatcaaacctcgtgtttgacgagacagacagggccctggagacatgggccagtgccaaccacgtggcactcactaggtacgtggacgatatcgcagtttcgggccacgtagacgatcgccacctggaggatctgacgggaatactgaatgaacatcactgggtgctgaacgaaaccaagacattgtttatgcggcgtggaagatcccagtacgtgaccggtctgagcgtaagcgacccattgcaagctagggtgccccgcgcccttaagcggagaatgcgagctaaactgttccttatggagaagcatgggttcgacgcttatatgaagagctttggcggggatgaccggggagagtgtccacagcagctgttgggccacgctagatatatcgccatggttgaaccaaaactcggtggcatgttgctacgccggtttagtctggctattgaagaatccgcttatgcaggggaccctgaggaggggtgggaagcttgggccctggatttgtga

SEQ ID NO: 14346 - RNA, 975 nt, synthetic construct
  source 1..975: mol_type = other RNA
atgaatatttcacgcagggcgttggcagcccggttactcgtgagcaaccgatatcttgacgaagcggcctcacgggtcactgtcggcgatgcttatattctgttatcccttcatcgcagaagaggagaaactccacgtcaaatcttcgtgcctgatgcagccacagcctttctcgtgaagaaatttcacgaatggatcaccagtgtgggcccccgtcctccagatcacgtatatgggtttgtgcgggggagatctcctttggaaaacgcgaggcagcacctggctaaacaggctgtgctgcggattgacctgagggacttcttcccaagcatctcggcccagaaggtaagagaggcactcctgtctgtcggtctggacgcaagtgcagccgaggttgcgacaagaatactgaccgtgaatgatcagctacctaccgggttcgctagctccccagccctgagcaatctggtttttcgtgactccgacatcgctatttcctcatgggccaaggatcacggtttgacgtttacaaggtacgtcgacgaccttgtattctctggcgagatcggaacagaagctgtttcagccgccgtggctatggtggagaaaactgggtggcgcgtgaacactgacaagacccgactgatgaaacgaggcgggaagcagtacgtgaccggattagcagtcagtgatcccgtcaggcccagaataccgccctccaggaagcggagcatgcggatgaaactccacctgatcgagcgcttcggctacgaaaggtacatgcgcgagttccagggggaggaacggggtgatacgcctggccatttgcgaggtaccgccaggtatatggctggaattgagcaacccttcggcagcaacctgctcgcccgcctaaatgcagttcttccggaatactggagtatggaggacagatctgatccagattggctcgagtggctgggagactttcattga

SEQ ID NO: 14347 - RNA, 1764 nt, synthetic construct
  source 1..1764: mol_type = other RNA
atggttggcgccgtcgcttttgaatcctccttcgagcggacagaaaacctgatcgccgacttatatgaaggactagtcagcgagtcttacctggacggactcgactcctatgagcgatttaaaaccgaaggcttccacgcctggaacgacacggctgaagtatccactgccttcgtgaggttcctgagtcggaaccgagggtacaagagttacatctatttcaccgaccgtactaccaggccagatctcggggccgaccaaatgcacgctattctgtatcgcgacttactccgcaacctgtttcaagaatatggcagcaggagactgaggctaattttcgagcagaatcacaagctggactttgagctgatagcgacagaggcagccgagataagcgccgtaaggcccccgtacagcatcgaagttggacagaagagggcccctcactccctgtcaatcgtggattatgctatggctatcttttcacgatggagagatacagcctactccaccagccctacaaccaataagtttcgctcttggtgcgccattcggaggtgggtggctattgtgagaagtgtcgagcagggcgccctttacagaagaggccacccagtggtatccgaggaacggggggtggagactctgacaagtgaacttaacgcccgcgactcacggactcaggatgggaccttaagctctcagccgccctctgtagcaggaccgtctccagcccttgagcccctgggtaggactgagtttgtcagatccctaggcgtggattcccagatcctggaaagcgtaggcgcagcagttcgggagggacaactgtacagggtgcagcaaattcggaagagaagagggggtcttcgaaagatttattctccatccatagaactcaaattgattcagaaactgatcagagaggagttggagtccgctttagtgtacgaggaccaccctaatgtgttcggctacattagcggtcggagtattatcgataacgcccgggttcatgttggcgcatcagtggtgcttcgcgtggacctcagggacttctttgcttcgataacgtcagaccgtgttgcgcgcgcgttgattgatcacggtgcaacacaggacctcgtctctctactggtgcctgtgctgaccgccgatggaatactccccgccggtttccccacttcgccattcatctccaatctggccttcagacatatggacgaggcccttttggagttgagcaattcacatgggcttgcatatagtcggtacggggatgatctcaattttagcggcgaaatcgatcgcgatgacgcttttctgaaactggtcgaacgcaccctggagttagatggctggaccgttaaccaaaaaaagacgagattcatgaggcgcggggggagccagtatgtcacaggcttgtatgtgggtgactctgttccccgggcacccaggaggaccaaacgtgctatccgcgcgcagtctcactttgtgtcaaagcatggattcgatgacatcgcacaggcgagagggcaccgcgtgaacactcctgctcgactcgcaggatggctgggctacctccagcgttttgaaccagacttcgtcgacaatatcttgggagtgggcgtcctgacactcgaagatgatcgggctggtagccgtgcagccgtcgacagttctgcccgagggtgggatgagtacctgtcaagaggagtgctcaggcatggcaagggaagcttgcatcgagctgatcctagttga

SEQ ID NO: 14348 - RNA, 981 nt, synthetic construct
  source 1..981: mol_type = other RNA
atggacatccgagcttttctccgacctatcgggttgacggagccacagctacgctccctgggagatgaaataagggccggtgcccgttatagcaagcggagagttcgtaagaggcatggcggatacagagatatcgccgtcccagatgtcgagctgaaggcagccctgaagctgctgagaatacgcctcgagtgtgttcttccatacgaagcgcccgacatggtgttcgggtacgtcgcaggcagaagcatcgttgacaacgcgagccagcatctcggccaggcctgtgttgtgtgcgttgatctagtggacttttttggggccatcaatggccgccggctagagagtgccttgctctcccagggcttagcggaggacctggtgcagcttctgctgccgattcttgtggtggacgattctacccctccgggtttcagcacctccccaatgttatcgaacgtagtattcgaggctactgacagggctttagaagaactcgccggcgagcaacgggttaggtattccaggtatgctgatgatctgacattctctggtcaacacgtggatgactctctggtcgctcgggtggatgctgtgctcctgcgccaaggatgggtgctcaatccacggaaaactaggtttatgagaagaggagggcctcagtacgtgacaggactgtacgtgggagatgcagctaggcctcacgtcccccggaggattaaacgccgactccgggcatggttccactatattggcgagtttggctactcagactgcgaggcaagagtcgcacttccctcagggcgccagcttgaggggtggcttcgacacgtgaaccaggtaaatcctgaagtggtccgttcaattgtgaacgacctggggcatagtgatttgcacgtagccttcggtgccatgggactggaactgaaaggcccccccagagacgactgggacgaactgctgggcgaattgggtttgtga

SEQ ID NO: 14349 - RNA, 981 nt, synthetic construct
  source 1..981: mol_type = other RNA
atgattgacctcgccgatctgggctccgcaagtgctctggatgctgatgagttcattcgctggtctaatctgattgccgccggttctggatattctaggatgtctatcccacaaagacggcggcgccctagggtggttctacgaccagaggtggcactcgacagatttctgaaacagcttacaataggactaagtcgtatcagcggatatatgccgcccgcagctgtgcacggctttgttaccgggagagacatcgccactaacgccgccgttcatttggaccaggacgtcgtgcttagggtcgacctcaaggatttcttcggcaccatcaacgaacaacgtctggtacgcgccctgggcgactatgaattcgatgaagatgctgcagacgctgtggcgggagtggccttagtcaatgatgctttggcccaggggtttagcaccagcccatttctgtcaaatatcgtattcacggagagcgacgccgagttaacaagcttcgcggctcgggctggtgtcagttacactcgatacgtggacgacctcaccttctcaggtccctacgagtccgtgaatgatgagctcctggaagccgcatccgcactgctggccgacttagggtggagcgttaacactggcaagacaagatttatgcgcaggggcaagcctcagtatgtgacagggctgtacgttggggattcagccggaccccacatccccagatccatgaagcgcctcctgaggcgggaggtgtactttgcatctaaatatgggcttagggacgcacggttgtcgtccccgacccctatgctccatgaccgacttaatggctgggtccattacgcggctcacgtggaccctgtatttggtaaaaagctgctggtggcctggaacgacgtcgcaagtcggagatacgcggatcgtgagtcagccgaatgggatgctattttggaagatataaacttcccagaggattggtga

SEQ ID NO: 14350 - RNA, 978 nt, synthetic construct
  source 1..978: mol_type = other RNA
atggtgtccattcgggcagtggcgcatgcctcagctctcgatgtcggtgaactgcttcattggcagcaattgataagttcaggcgcaggctatacgagaattactattccacagaggcgtcgacgcccacgagaggtcttgaggcctagcgtcggcctcgacagagtgctgaagcagttgaacatcggactggctcgggttagtaattacagccctccccatgccgtccacggattcatcagaggcagggacattcggaccaacgccgcacagcacctggataaggatatcgtgcttcgagtagacctgcgcgacttcttcggctccatcgatgcatacaggcttactgacaccctcacaggattcgggtttgaccaaaacgcggccagcgccgttttaggtgtaacaattgttaatggcagcttggcccaggggttttcaacttcgcccttactaagcaatatgacgtttgccgacgccgatctggcactgatgaaactagcggccgatgtcggagtgtcttactcccgctatgttgacgatcttactttctccggcagctttggggaggtggatgatagattactgctcagaatcacagacgtgctcgaaagtgctggatggatagttaatagcaacaaaacccggttcatgcgaaggggtaaagcgcaatatgtaaccggtctgtacgtgggagacgctgtggggccgcacattcctcggagtatgaagcgcctgctccgcagggaagtgtattttgcctcaaagtttgggatagacaacgctagactccgctcccccaccccaatggagcacgacaggctgaatgggtgggtgcactacgctgcccatgccgatccacatttcggccagaacctgagggacgcatgggctacagtcgactcccggcgtcccgcttctagatcttctgcacaccgggtgcagatcctggatgagatcgatttccctgagtcttga

SEQ ID NO: 14351 - RNA, 990 nt, synthetic construct
  source 1..990: mol_type = other RNA
atgttcgaggtagacgtggagacactggcatcggcctcatatatgaagtcagccgatgtgctggtgcggtggggggagatgctccttatcgaaggcctgggctacacgcgcatagctgtgcctcaaaaacgcaggcgaccaagagaagtgttaagacctaatatcgggctggaccgggtgttgaagcacctacgactcggcctggcttccaccagcgggtatgaagcaccagatgaggtccacgggttcgtccagggtcgtggtacggtaacaaacgctgcctgccacctcgcgcaggatgtggttttgaaagtcgacatcaaggacttttttgatagtatcgggtctgaggaagtctgtagcgccctgactaggttcggcttcaccgacgagtgcgccgaattggtcgcctctgtgaccctagttgatggaaagctggctcagggcttcagtacatcccctcttctttcaaacatagccttccacgcaaccgacgaggctctggcaggattcgcgcatactcggggagtgacttttacacggtacgttgacgatctcgccttttctggaaccaaagacgctattgatgatgagttcctggaatccttagatgtacagctgggcaatgtgggatggaggatcaacccagcaaaaactcgcttcatgcggaggggaggcccgcagtttgttacaggcctgtacgtgggggaccatgcaggtgcgcacattccccggcccatgaaggaacgtctccgcagggagctttattttgccgaacgctttggtgtgagcgacgcaaggcagagaagccccagacccatgagtattgagagactcgccggatgggttcattacgctgctcatgccgatcctgctttcgggttgcccctgcgagacaggtggcaaagaatcgccccggccctggattcctatgtccctggcccagactgggacttactagacgatattgagtttccagatgactggtga

SEQ ID NO: 14352 - RNA, 978 nt, synthetic construct
  source 1..978: mol_type = other RNA
atgatcgatgcagatagccttgcacaggcaagcggaatgaccgccggctacctagcacatttgggcgacctggtgcagaatggaaccggttactctcacgtggtgattccacagaagcgccgcagaccccgcgaagttctgatcccaagtgtggcgctcgacagagcgttgaaacaactgcgaatcgggctggaaggacgtagctcctatgaaccacacgacgctgtgcatggcttcgtcgctggccgggacatcgtgaccaacgcaagccagcatttggggcaagacgtggtgctccgagtagatcttgctgatttcttcggcagtatagaccgggataggctgaagtcctccctgggtagtgccgggtttgccccttcgtctgctgaaatgatcgccaatgtagctctcgtgaatggggccctcgcccagggattttccacttcaccccttttgtccaacatgtcttttcaaaacaccgacaagatgatttctgatctcgccaaccagaaaagcgtcacgtatacacgatatgtggacgacctggtgttttctggtgatatgtacgccgtcactgatgacctgtcaaatgcgattgagactttactgcaggaagagggatggaaagttaacattaggaagacgcggtttatgaggcggggtaaatcccagtatgtgacagggctctacgtaggcgatgcagatcggccccacatcccgagaggaatgaagaagagattacgccgcgaggtttattttgccagcaggtacggcctgacagatgcccggcagcacagtcctactccgatggacccaaaaagactgggcgggtgggtccacttcgctgcatacgctgaccctgtcttcggcctaccccttagagagacatggagggctgccgttaggtcagatcctccacccgagtcacgtacctgggacagcgtcctggccgacatagggttccctgaggactggtga

SEQ ID NO: 14353 - RNA, 981 nt, synthetic construct
  source 1..981: mol_type = other RNA
atgaccaccacccgggacttggccactcacggaggaccttcaccgcaacagtatccattctgggctgccgtgttagccgcaggccatggttattctacattggccatctctaaaaggaagagaagagagccacgggtggtgctaaggcccaacgtcggccttgataggtttctcaaacaggtgagcaccgcgctcgtagctggactggacttcgcccctcacgacgcagtccatgggtttgtggccggtagaggcattgtttccaatgccgcacagcacctgtctcaggatgtggtactgaagctggacctgcgggactttttcggctccgtccgcagagaaccactgactacagctctggtgcaggccggcctcgatgagccaacagcgagcgaagtcgcagcagtggtgactgtgaacggctccctgccccagggattcagtacctcaccactgttgagcaatgttgcctttgatcctactgatgacgctattcaagcgatagctgctagtcggggggccacttactcacgttacgccgacgacctgacattcagcggcacgaacggggcagtcgatgatacacttctcagcgacgttgtctccgctttagaacaccagggctggatcgtcaatccgggaaaaacgcgcttcatgcgcagggggcgcgctcaatatgtaacaggactcagtgtggacaccgccgatggtccacacgtacctagggtgttcaagcaaaatcttcgcagagaaatctactttgccacccggtacgggatctcagatgcccgagtgcgatctccccagcctttacgggagtcgcagctgcatgggtgggttgagtttcttgcgcacgtggagccccatcgtcgtgctgagctccgagaggcctggaagatcattgctcccaggccttccgcacgcagagttgagctatgggatgaactgttggacgatatagacttccccgcaaactggtga

SEQ ID NO: 14354 - RNA, 987 nt, synthetic construct
  source 1..987: mol_type = other RNA
atgaccgtggtgcagcagaagttagtctggcgctctctgaaatggcaattgcaggtggtcggctcaatgaatggccgactgccgaccactagtgagagctcagagtggagacaatgggctatggaacacgcccgccctgtgcgattcagggggagagacggatggcgctccgttggacctcttgactcccttctcaagcgtatgaccgccgcgctgcagagcctatatgtggcgcctgattccgttttcggcttcgtgagtgggaagtccacctattccgccgcccaagtccatgtgggtgccccaagcgctttggttgtcgatctgaaggatttctttggtcaaatatcggaacagcgcgtcagagatgctctcaatccactgctcgacgaagaggccctggacgtgtttgtagggtgctgtcttaggagcaatacactgccattgggctttaggacttcgcccctaatcagcaacctggtgttccgggagacggaccgggacatcgagcgcttatgcgcagctcgggccgtaaaatacactcggtgggtagatgatctggtgtttagcgggagcgcagtggatgacagtttcctccacgaccttctcgcggtcctggattcacatgcctggctgccgaacgaaaagaaaacaaggttcatgtctacacgtagggtggtgttgggattaaacgttgcacagtctctcacacggccccacgttcctagaggcatgaaaaaagagttgcgaaagcaggtgtactacctttccaagtttggaatggcccatttttcacacgcaggtgcctggcccctacccagaattctgggaatgattgcttacgtcaagtccgtagacccaaacctggccgcactgctcgagcagcagttgcacgcactgcccaaatcttctaggctggttgcttattctagtgctgtgggagggggcagatggcagatggctatgctcgaagaggtcggcctgtga

SEQ ID NO: 14355 - RNA, 912 nt, synthetic construct
  source 1..912: mol_type = other RNA
atgctcccagcctcggcgtccttgtccgagtgggacaattgggctggggaaaatagtcgaccggttagattcagaggcagggatggatggcgatccgtcgggcctctggactctctgctgaagcgcatggccggaactctgcagtccgagtactcagcacccgatagcgtttttggttttgtccccggcaggagtaccttttcagccgcacaagtacatatcggcgcggaaagcgcgctgacagtggatctgaaagactttttcggccagatcaccgaacagcgtgttcgggctggcttgggtcatgtactcgatgcagaggccatggacgtctttcttggatgctgcctgcgcagctccacattgccactcggattccgcactagtcctgtgatttccaatctggtgttcgccgagacggactataagatcgaggagttatgtgcaaggttatcagtgaagtacacccggtgggtcgatgatctggtgttttcaggccccagcgtggacgacgccttcctagctgaagtcctggatatactaacttcttttggctgggtgtgtaacgaaaagaagacccggttcatgtctacacgtaggttcgtgctcggattaaacatcgcaaagggactcgaccgacctcacgtaccaagaggtatcaaacgcgagctgcggaaacaggtgtattacctgaggaagttcggggttgcccacttcagcaacgatagagcctggccacttccgcggatacttgggatgattgcttacgtgaaaagcgtggatcccaacttggctctcagactggagcagcagctggtccaactgcctaaagacccccttcttgccgcttattctagtgcagtgggcgggggtaaatggcagctcgccatgttgtctgacattgggatgtga

SEQ ID NO: 14356 - RNA, 927 nt, synthetic construct
  source 1..927: mol_type = other RNA
atggtatacatgttgccccggcgggctctgctcattagctgggagatcttcagcgtgagaatccagttagctgacctcccccctagaagtgcgcctgagtgggatgcatgggcccgcaaaaatgaacgcgtcgtgtctttcaggacgaagcatcggtggcgccaagctcgaagggcaaccggtaggctggacagcgctcacaaacaggcccgtgcacttctagcagccggatgggcaccgagtgctgccgttcatgggtttgtcaggacaaagtcaactaaatccgcggcaatggtgcattcaggcgctcgcgcagccctgactcttgacctcgccgatttcttcggacaggtcacatttaaccgcgtggtggataatctgaggatgagattcgatgaccggtcttgtgactggatagaaggcgcgtgctttcgtgacggagccattcccctcggctacagaacctcacctgctctgtctaatttggccttttccctgacagatgacgagatcgcagacgtggccaggagacacggtgtggcctatacccgttgggtggatgacctgaccttctccggggccggggtaagcgatcagttgttagccgatgtccagaggacactagccggccaaggctgggcggtcaacgacagaaagacccgctttatgcggcggagtccctacgtccttggcttgtacgtgggtcatgacgtggatcgaccacgcctcccacggcgaatgaagcagaggctccttgtggaaacttatcacttctccagactggggtttgaacacttttcgcacgaaggcgttatgagcccttcaaggctgttcgggagagtagcttatgcctccgtgattgagccagagctggctgagctgctgaacgagcgggttgatgctggacaccgagttggaagatcttga

SEQ ID NO: 14357 - RNA, 906 nt, synthetic construct
  source 1..906: mol_type = other RNA
atgataacctggttacactttagtgcccgtcttggtctgtatgatcttgagccaaggtcggcgagcgattgggcaacctgggcaagccggtatcgagtccccgttagcttcccggtcaggggaggtcgcagggtgacagtaaggagcgtcgggcgtttggacctgagtctgcgggcttttaagtctctgattgccgaagtgtcgttcccacacgcttccgcccatggatatgtgagaggccgcagcacggtatctgctgccacaccccatgtgggtagcagtctcgtgctatctgtggacctgaagaatttctttggccagatcgacttcgctagggtgtcccctgtactggaggcttcttttgatgctcaggtgtgccagtggatcgagggtgtttgtttcgtgtccggatccttgcctctcggctaccgatcttctccggccttatccaatattgcctttgcctccgccgatctggaaatattcaactttgcggcaaaggccggggtcgagtatacccggtgggttgatgacctgtcattttcaggcgaaggagtgggcgacggcttcctcgaagggcttcaggcattgctggccgacgaggggtggctggttaacgctcggaaaactcgttttatgaggagagcaccctacgtgctgggcctctatgtcggccgggatgctactgagccaagattgcctcgccgcatcaagcaaagacttctcctagagtcatactacttcgcgaagtacggaatgagtcacttcgacagaccatacgtcctgccccctctcaccctgttcggatacatgagctacgcctattcagtcgaacccagactggcaacagttctcggggagcgaattgtgaaagggatcggcaaatccgggggacggttacgctga

SEQ ID NO: 14358 - RNA, 972 nt, synthetic construct
  source 1..972: mol_type = other RNA
atgacactctccagagtgcgggagctggaattaaaaatgggctacgccccaggatccctggacagacttgcgaggatattcgatgccggagcaggccactcagtaattcgaatctctagcggcaaatccaagaccaggcacgtggttaggccaactgtggcactggatgggatgttgaaatcactcaggcgagtcctggaagccgaattggggttcgaacctatggactgtgtgcacggctgtgtccgcggacggagcattttaacgaatgcaagtatgcacctcgcccgtcccgttgttctgcgcgtcgacctgaaggacttctttgattctatcagcacttcagacatctctgatgcgttcaaggtgttggacgtcgatgacgaaaccgccgagctgctggctcgatgcaccaccattcatggccgcatgcgggctggcttaagcaccagtcccctgctcgctaacttggtgttcaactcaactgatagggatctccaagagatcgccgcccggctggatcttacctataccaggtacgtggatgacctggtgttctccggagagacaatcaccgatgacactctcgccactatagcagaacagattgttgctagagggtggacaattaatgcccgcaagacgcgttttatgagatcggggggagctcagtacgtaacagggttatctgtcgatgtggagtccggtccccatcttccgagaagaatgaagagatttctacgcctggaagtacactatgcgacactgcatggctttggaagtggtagcacagggaagaggcggcttataggcctcatcaactatgctaaatgcgtggaaccttggctcggtgccgagctgcatgactctatccgggaggcaggactgctagtgggtcgcagcgagagtgaggatgcatttgaggacgctgaagacttttgggacgagcttggcttgcgtgacgagtactga

SEQ ID NO: 14359 - RNA, 963 nt, synthetic construct
  source 1..963: mol_type = other RNA
atggcggtcactgtggaccagattgaacgtatgatgggcgtcccacccgggacactcgacaagacggcacggattctggaagctgaaaccggattcacgatactcaggataccctcacgaaggggcaggttccgcagggtggtccgtctgaccaccaccctcgactcaatcataaagggaattcgcagatccctggaggcgcaactgtcttttgttcctcgggattgtgtgcatggatgcgtgaagcagagaggaattctgactaatgctagagcccacgtaggaaagaaagttgtactcagaatcgacatccggcggttctttgagtctattagcgtgagccaggtggaagatgcactgcgcacaagcgaggccgatcccgagtcgagcgctttagtcgctcgctgcaccactctgggtggtttcctgcctgtaggattctctacatcccccttgttagccaacatgattttcgatgggacagacgcccttttgggggactgtgccaagagctactctctttcatacaccagatatgtcgatgatctgtcctttagtggcgaacatctcgatgatcaaatccgactggagatcgaaggcgtgctaagatcccaggggtgggaaatccaggatcgtaaaactaggtttatgcgggcaggtcatgcacagtacgtgacaggcttgagcgtgaacgaccctaacggcccacatatcccacgcaatatgaagaggtttcttaggcttgaggtgcaccacgtggtccgaagtggcttcggcgccagtgtgctgggtaaaagaaaactgctgggccacattaatcacgttaaacacgttgactatgacctcggcctagagctgcatgacgccatacggtccgctggactccttgttgggcgccctgacgacgagtctccggaggatgggttagagttgttttgggaagatatcgggatcgacttctga

SEQ ID NO: 14360 - RNA, 978 nt, synthetic construct
  source 1..978: mol_type = other RNA
atgagaagcgcagcccgactggggtttgttgccggtgtcagggcatctgctctccagcaaatggctctcacatttgatcgcggtcttggctactcaacgctggaagtgccaaaacggggtggaggatcaaggaccgtattgcggccagtcagtgaactcgaccacaatctaaaactgctccgcagaggtatcgatactctaagctcttatagtcctccggagtgggtgcatggcttcgttcctaagaggtccattgtgactaacgcccaagcccacctgagcaaggagattgtactccggctggatctttccgctttctttgagtcgatcaaaaagagcgccgtgcgcgaggccatgctgagattcggcttcagtgatgacgcttctaccctcatctcagattgctgttgcattcacgggtcactgcctgccggcttctccacttccccaactttgtccaacatggtgttcttacccaccgacgacgccctgcatgagtgggctggctctaggacccttacatacacacgttacgctgacgatcttacattcagcggaacagatatcacagatgatgattgtgcagagattgcccgcatgctgagcagtgctgggtatgcagttaatgcgcgtaagacccgatttatgagacgcggaggaccccagtacgtgacggggttatacgtcggcgaatctgaccaaccccacgtgccgagacggatgaagagattgctgcgacagcaggcgtattacatagctcagtacggatactccgaggcccagactagatcgtctaggcagttcaccccctatcagctccgcgggtggataaactatatgggcaccttgcacccagagttagcggcaaggctgcggtgcgccatctttgcacggttgcctcaggcaccagaaaggcccgaccctagcgattattgggacgacctgctggacgaactgcatatccccgacgacttttga

SEQ ID NO: 14361 - RNA, 993 nt, synthetic construct
  source 1..993: mol_type = other RNA
atgcgggaatcagcaccccgcactttctcccatcgtgaagaagctcctatgactattctgtccgacacgctcacactggatgaccttgtcatcgccgccactctgcctgacacagctcgagatctaatggaggaacctgtccgcccatggcagctgaacaccattacagtgcgtaagtcaccgggcaaatttagacgggtagtggagccaagggacaattcactagcacgcgtgcagaaaaagctcaaagagtttctggacagggatgtgctggagccacatccctgcgtacacggttttaccagagacaggggaccgtacactaacgccctcgctcacttaaatgcccgggcagcgctgacgatcgatatatctgatttcttttcctctgtgagcagtgacgacgtgcaaagcacactggtttcgttcggggcaagcaccgctgttgccaggggaataacaaatgtttccgtctttgagaacgtattggcgaccgggttctctacgtctccagttctcagcaatatgtactttagagacactgatgacgtgttggccacctttgccgaggaattcaaccttacctacacccggtatgctgatgatctcactttcagtggagaggacgtcgatgacacccatcttgccgaaattacacgcgttctggaaagcaaagggttaagagtgaaccagaagaaggtgcgcttccaacggagtggccaccctcagttcgtcacaggatatgtcatcgcgcatagggaccaccccagagtgggtcggtatttcaagcgacagttgcgcctggatctccactacgtgatgaagcatggcctggtacaccaagctcagttacgaggcttgtcaccccaggtgcttgcaaaacagctcgccgggaggatcaactaccttatgtgttccgagagagacttggccgtccacctgaggcagaagtacggccacctgctggacgatgtggatgagaatccctattga

SEQ ID NO: 14362 - RNA, 1008 nt, synthetic construct
  source 1..1008: mol_type = other RNA
atgcgcttcgcgcgggtcagttatctggtgggcattgttgtaattggtgacttccgggcgccacatccacgaaaggaggaggtgagcattctgaaagatctgaggacagctgaagagttacagatcgccgctgccctgcctgattccgcacttttgtggctatgtagacccctctcagctgaagacatctacgtccacgagatcagaaaaagcaagggccgcttcagacgcgtctatgaaccgagagacaacagcttagcccggctcctgaagcagctgaaggagtttttggacaggcaagtcttccagccccacgctaatgtccatgggtttataagagacaggtccatctttacgaatgcaaccgcccatcttggcgcacgagctatactggctgtagacatatctgacttcttctcctcaattagtcgggatcagatcactggcgccctgatcagcctgggcgcaagtgatcaggtcgccgtgtctattgcgaatgtgtgcacattcagaaacgaactagtgactggtctgtcaacctctcccgtgctgtccaacttggttttcctccctcttgataaaaattttgagtccctcgctgttgagcgtggtctgacctattctcgttacgcagacgacttaacatttagcggggatgccgtagacgaccagttgctggccgtggtggccgaacggttgtctgagcacggattcaagatcaacctcaagaaggtgcgctttatgaggaaaggacaccgacaggtggttaccggagtgtcagttgcatgcggagataagcttcgtctgcctaggaactttaaaaaacgcattaggcaagatctctactttagtgaaaagaatggcatcagccttcaggctctgcaccgcgggttctccaacgacgaagattttcgggagagtctgaaagggaagatcaatcatctaaactcggtggattcttccgccgccaaactcttcatgagccaactcaataacattagctcatga

SEQ ID NO: 14363 - RNA, 987 nt, synthetic construct
  source 1..987: mol_type = other RNA
atgcaccctgtcggaataaacatcgagcgcatcaaaaccctgattgagctggctagtttatttgatgtgtcagaggagatgctacagggtttcatcgataaccacgatgaattagtggccagagtcctgatgctcaaaaaccggtctggggagtataggaaaatagtgtttactaagagcgacccttaccgtatcttcctccggacgctgagcgcattcttgtacgagtggtattcacaccgaatccctgatagcgtccacggatttgtgaagcggaggtcgattatcacgaatgctcagcagcatactcaaaaaaagtctgtcaccaatatagacatcaaacatttcttcgagagcataacatttaaggaagtgcatggcattttcatcaaagtgggtttccaagacaagattgccgggaagctgacagaactggtgactgttgacggcgtcctcgccgctggatttgcaacctcccccgtactctccaatattgcatgcttggatttggacgaagattttaagaacctggcaaacgaacacggccttatttatacccgttacgccgatgatatcaccctgtccagcaataaagagattcccagtaaggaggagattaaaaacatcctaatcaagtacggattcgagattaacgaaaataagtaccgcatttatcgacgcggcggaccgcagtacgttacagggctctccgtagttgacaaaagaccacggcttagtaagaagtttaaaagaagactgaggctcgaactttactacatcaagaagtatggctttatggaccactgggccaaggccatcaaaagggcgatcgacaaaaatacttatccatccaggttctcacaggtggcgtacggcggttgggggttggaaggctttgctgccttcattcattctgtggaacccaagcttggttctaagatattcaaaacactgctgaagcgcggggaggacgagatgtattggtga

SEQ ID NO: 14364 - RNA, 981 nt, synthetic construct
  source 1..981: mol_type = other RNA
atgttccccacgaacatcgacatcggcaaaatcaagactctgagtgaattggcacctattcttagcgtttcggagtcacaacttaggtacttcctggaatctaaagagtcactgatcaaacggggcctcatactgaagagaagtgggacctttcgccgcattatgatggcaaaagacgatagctttcggcactttctgctcaaacttagctctttgttctactctaaatacgaactccacataccggccgcggtgcatggatttgtgagggggagatccattgtgactaatgcccaacagcatacccagaagaagatcgtcctcaatgtggacatcgaaaacttcttcgattcaatctctttcgaacaggttgtcgccttactgatttcctttggtttccaggagaatatcgcaaaggtgctggccgagttgacaacagttaacggcattttggctaccggcttttctactagtcccgtcctatccaatatggcatgcatagtaatggatggggtcttcaagtcatggtccaaaaaacgaaactttacatatacgcgctatgctgatgatctaacatttagcagcgagcagtatgtaccagctcagaaagaaatcgccgaaatactgggtcatttcgggtttaaaatcaacctggataagtacagggtgtataggcgaggaggaccccaatacgtgaccggtctgactgtggtggacaagaggccacggttaggccgaaagagaaagagaagtatgcgtctcgagctctattacattaagaagcacgggttcctgaatcatttctaccacgccctggaccgggccacaaagagacacgagctgccaagcaaattcacccgcaccgtgtttttcggatatggcgttgacggatttcgcgcctttatgcactccattgagcctcggcttgcgtgtaatatgcagcaggtcttaaaaaaggaggctcctaaggctcgtaactga

SEQ ID NO: 14365 - RNA, 1329 nt, synthetic construct
  source 1..1329: mol_type = other RNA
atgcctggtggggacggcctcagatcttggcgtcatgcttccgcaccatttcggaggtgtttgcggcttcccaggggagcgctcaggagaattggccaaaagctgcggctcccccatagacttagaaggcgacctacacccaggaggcagaaagctccttacaccgttgatgcgggcggtgccgctgcacttgggacaagtagaccaagagatcacgttatgtgtgaaaaccctgctatggccccccccgtcccgctttttgaatttacctgccaccaatcagtcgcctctcttgaagtccccttgggcaagccgactcatgccctggagcacctggcgacgacgtgcgattcaggaggagcataccaactgaattacttttggattcgcaacaagctgcggtccgttagcgctccaaaccatcagctcgatctggtgcatcgacgcattaactctctgatcttccctgtggacctggcaatgcgccgcgaggtgaatggattcattgcacgccggagcaccataacaaatgcacggccacacgccggcgcaaggtatcttcagaaattcgacatcaaggacttcttcataaacatccgcacactccaggtgagagctgcgctccgcaacatagggttcggtccaggggccgcaaccatgctatctcgattagtaagctgcaatgaccgtattcccttgggagcccgaaccagtccgagaatcagcaacttagtgctcatgtcctttgatgacgccatgatcgctctcgccgacgagcgggacttggcctatacacgctacgctgacgatctaagctttagcgcccaagcgatgtttgatgtcagctcagaggtgagggctgccctgacatccagtgggttcgagttgaatgcctccaagacaaaatctttcaagcacggacagccaatgtttgttactggcctggccatctccgatgcatctaggccaagactacgtaaaaggctgaaatcgcggctccgccgggagttctattttgtggagcggtttggactggctggtcacgccaataagatcggggcccacccagaaaggactgcctcaagattgttaggccagttccattacgcgcgatccgtggagcctgaatttgccactagactggaggccaaatacccaaccgcttttggcgaactgattcctcagcgaaccgacgacagagtggagcgtgcacagcggtcgaggcgtgaattcctgaccgatgtggagaatgctccccagcagacgctgcccttctatactcctactgcaagtctgcctttcgtacccgcccaccgcgctgtcgaatga

SEQ ID NO: 14366 - RNA, 1074 nt, synthetic construct
  source 1..1074: mol_type = other RNA
atggctcctctgactagacagttggagtttaccttccacgaaactgccgcatctcttgagagcgtgctcggcaaaccatcatccgcaatcgaagccttggcctcctcctgcgatgctggcaccgcctatgaggtgggcgtactcagtattcgacgtaaattgcgcgtcattcgtgtaccggagcgcgagttagacgccgtgcacagacgtataaatatgttcctgttccctgtcgacctgagcatgaacccacacgcacacggatacgtggcgcgcagatctacactctctaatgcctcccctcatgtgggagctacattcctccagaaattcgacgttaaggatttcttttcatccgtttcacgcgaacagatcgctggagctctgactcggatcggcctcgggcaagatgccgcacagctgcttagccggctggtgacctgtcagggggagttgcctctaggggcaaggacttcaccacggatatctaacctggttcttgccgattttgatgaatctatcggagcagttgcctccgatgccggcctgacatatactcgctacgcagacgacctcaccttctcgagtcaatcggcttttgatgtgagccacgaggtccgaacgcagctggaattaaggggttttgaactgaacctggcaaagagtaagtcttttcgctacgggcaaccaatgttcgtcacggggctcagcataagcgacaaaaccagggctagagtaagaaagaggtttaaaagtcggctgagaaaggagttctattttgtggagaagttcggtattgagggccacgcggaagccattgatgaggacgagcatcatgccagcgctcgaatcatgggccaattccattatgtgagggcgatcgaacccgattttgccgctaaacttgcagccacctacccgacagcgttccagacacttatccccgaaagatacgacgaccggattgctcgggtccagaggaagcgggacgagtttctgaccgacgtggccaggcagcccggtttacatctacctgtgtacttgcccacaactcccctgaccgtcggacgatga

SEQ ID NO: 14367 - RNA, 1071 nt, synthetic construct
  source 1..1071: mol_type = other RNA
atggcgcctctcgaccctctttttgaataccgagtgcatccaactcgtgcatcactggaagcccccctcggaagagactccatgaccttggaaggcctggcagctaggtgtgatgagggtgatgcttacgtcacaggttttatgaccattcgcggaaagtccaggttcatagctgcaccaagacctgaacttgatgcggtgcagcgacggatcaatcttctgctgtatccaattgatctgagcctgggcgcttcccctcacggctacgtagccaggagatctacattaacaaatgccagaccccatgtcggcgcccggtttctccagaaatttgacgtgaaggactatttcgcgagcatcaccgcgtctcgaatcgccaccgccctgactgagttagggttcggctctgaggccgctacactgatttccaggctcaccagccatcgcttgagacttcccttgggagctcggacttcaccgcgcatcagtaacattctcctgattgactttgatgaccagatggaaaacctggcccgtgagcaggggttgcggtatacccgatatgccgatgatctagctttttcctctcagatcgccttcgacgtgagtgaccgggtggaacaggcaatacgtgccgccgggttcgagcttaaccctatgaaaaccaagcagtttaagcacggccaacctatgttcgtgaccggtctgtcgatccaggatgccactcgcccaagggttcgaaggcgcctgaaggcacgcttgaggcaggagttctactatatcgaaaaattcgggattgaggaccatgccgctgccgtaggggagagttggaggggagttctccacagattaactggacaatttcactactgcagaacaatcgagccccagtttacggctcaactaacgctcgactttccagctgcatcatcaagcgttgcaccagtgcacgaagacagccgcgtagaaagggcacagcggcaccggagagagttcgtggcagaggtcatgcggcaactgcccacagctatacccttctacgtcccgcaggccgatctgttcgagaattga

SEQ ID NO: 14368 - RNA, 1083 nt, synthetic construct
  source 1..1083: mol_type = other RNA
atgtccactccagccggccctttcgattatatcctgtccgaacagcatctggctagagctctcggggtgccagtagctctgtttgaatacgttgggaacctggcagagatggggaaagcttacgagtaccgtcggaaatctatccatggcaagatccgggagctaggagtgcctgtggattcagtcatgtccttacagcgaagaattacggacttcttgtggcctttgtccttagagctgcatcccgcctgtcacggatatacccccggccgaagtgccacgactaatgcagcaccccattgtggggcgcggtgggtacaacgccttgatatcaaagacttttttccgaggacaacaccaaacatcgtgaccaaggccctagttgagagaggagcacatcagacagtggctgaacttctgaccaagctgacaaccgatcgcgggagtttgccacttggcgccccttgctcaccgctgttgtctaacctgatccttacccccgtggataatcgagttgccgatcaggccgccagcattggcgtgagctacacccgctacgctgacgatctgacattttctgcagacgccgaattcgacatgaccggagtggtccagtctgcgctccagcctctgggatacacgctcaatttagaaaagagccgcttacggcggcgcggtcagtcaattgccgtcactggcctgagggtcgccgagatggatcaccctaggctccccaagcgttttaagagagaactcagacaggagttctatttcatagaaaaattcggctttgccgaccattgcaacacacgttatttctggcactggatagacgaggaagacgacgagaaacaactggaccacagtactagacacctccaaggtaaggttaggtatgcactgggagtggaacccgactggatgagggccctacttgatgcccacccagtggctgcgagcgagttgactccgcccaaaagacaccaggctgatcaacggctggcggctctcactgcactggctgcagagattgtcggtaggcgccacgtatcgctgagccgagagccaaccaggctcggttga

SEQ ID NO: 14369 - RNA, 1101 nt, synthetic construct
  source 1..1101: mol_type = other RNA
accggcccatttcaattcaggggaaccaatgccctgttcgctacagcgttaggtctgactgccgagcagcttgaagaggccattaagctggccggcgaaagatcaagttaccagttccggacagtgcgcaaacggggaaaagaacgaacgttcatctctccacgcgcccccctacttaacttggcacagaggagggttgccgattttttgaggccctttaacgagctcctgcatccagggtgcgtgggatacgtgcctgggcgaaggactctggacgcagcaactcctcatagcggcaagccttgggtccagaaacttgacataactgacttttactcctccgcgcaggatacaatcatacacgacaccttcgtctctctgggggctactcaggaggtcagcgagactctgacctcccttgtaacatgggagggcgtcttaccgaccggcacaagaacctcccccgtggtgtcaaatctcgttctcgctgatttcgactttgaatgtgctgcagaagccgaaaggagaaatttagcatatacccgctacgcagatgatctgattttctcgggcgacgatccgttcgatatgagtggatgggttgaccaccatctgcaagcgattggatttaagctcaaccctaggaaatccgtgctgtgccgtagaggccaacccattcgcgtggctggcctaacgatctttgaaaaggacagaccccgccttcctaaagcgttgaaacggcggctgcgtcttgagatctatctcgtcagtaaggacctagccgctggacactttgagtctcctggggacgaggatgattatcctccagaagtagaggaggcccgcgctaggttcttccacgctcaggggatgctgcggtatagcgccggaatcgagcccgcctttgtgcagagcgcactcgacaagcacggtgaagagttgagagatctgctgctccccgccagacggagacatcgggacgagctggaactgcgacgcctcctcgctaagattctgggtacacgtgcaccaggtttgggccgaaccccgtctcccatcccttcagccccaccaatctcacgggtgagcagcgttgggtga

SEQ ID NO: 14370 - RNA, 1068 nt, synthetic construct
  source 1..1068: mol_type = other RNA
atgaccccacgtaccagcccagcatccaccttaagatctcccaggcatttggagttgtatctaggtgccccactctcggcactggaggccatagctgcagatctcgctgcgggcgtaggcgttgaagtggtgactctgagaagtaaaggcaaggcccgagagattacatgtccgaccgatgaaactgtgcgcaatgtccaccgacggatactctccatgatgactcctgtgcagatggaccttcccgacatggttacaggctatgtccgaggccggagttcagtgtcaaacgcccaggcccatgccggaggagcctttctgcaaaagttcgacttgcgtgacttctttcaccacatttctagtgacgcagtcgcgacagggctgagagacgtgggattccaggcggaggtcgccgcattacttgccggcctgactacatgcaggggactcctgccagccggattttccacaagcccagcaatggctaatctggcttgccgcgcattggatgaagatatcgccgccctggcggacagtctcgggttaatcgtcacgcggtacgctgacgatctaaccttcagcggggcccagttcttcgatgtgaggtcagacatcggggtaatggtgaaagcccactcacacgtgctgaacgaggaaaaaacaaggaccctgaagagggggcagcccatgtacgtcaccgggctgtctgtaagcgagaacgacagacctcggctccctcgacctttcaagcgcaagctgaggcaagagcttcattatatttctgtttttggcctagcagaacatgctgacagacacggagtgaaagttgagggtctgcgctttcgcctcggtggccagcttgcctatgccagcgctgtcgagcccgatcttgtgaagtacttcgaagctcattttcccgctgcataccgcgatgtggctcgggcacggtcccctatcagcgatgacaaaagaagaactaggctggcccagttggccgctcgtgttgctgcacggtccgatccgctggctgagatgtacgaacccaccgtgacgatcgccgcgctctga

SEQ ID NO: 14371 - RNA, 1062 nt, synthetic construct
  source 1..1062: mol_type = other RNA
atgacaccacggacctcttccgttagcattctccgcactcctcggcatcttgaagtgtacttaggggcacccctcgctgccctggagagtattgccagaaatttggatgtaggcatcggagtggaggtggtgactctccggtccaagggcaaggccagagtaattgcctgcccgacagatgaggccgttcggaacgtccacaggcgaatcctcagcctcctgactcctgtccagatggacctgccagacatggtcacaggatacgtccgtggaagatcatccgtgacgaacgccatcgtgcatgcaggcgctgcccatctgcagaagttcgatctacgagactttttcccacacatcggggtagacgctgttgacgaagggctgcacgccgcaggcttccaagaggaggtcgctaggttgctaagcaggttaacaacctgccgcgggtatctcccagcaggtttttccacgagcccggccatagcaaatctggcatgtcagtccatggacgcagaattggcggccttggctgagcaggagatgctgaatttgactaggtacgctgatgatatcgcctttagcggaatggagccattcgatgtgcttgacgaggtgcggcagatagccattgcgcacggccacgccctgaacgacgaaaaaacccgaaccctgaagcgggggcaacccatgtacgttaccgggctgtcagtcagtgagcaagaacgacctcgcctgccccgccctttcaaacgcggacttaggcaggagctttactatgtccagacacggggcctcgccgaacatgcttcatggagaggtgctaaagctgaggcggtgaggtatcgtctgggtggacagttagcctacgctagtgctgtggaacccggctgggttgaagctcttaccaccgcctttcccactgcctttcaggaagtggccaggcgcaggtcgtcacagtctgacgcgaagagaggcgagcgtctggcacaactggctgccagagtgatcgcaagaaacgatgcagcagcggaactgtatgagccttctgccacaatttcttga

SEQ ID NO: 14372 - RNA, 1077 nt, synthetic construct
  source 1..1077: mol_type = other RNA
atggagatcgaccggcgcgtaccttcattcgccgactggttgaatgaggcggatgtcgcaaatgcggtaggcatgcagctcgaaagcttagcccagacagcgagacgtttagccgaggacgagggggtggtgcactcacgtatcctgaccattagaggaaagcagcgcctggtgcatactcccagggacgaaggtgtgcgccaagctctgattgctttgatggcctccatcgaactcccgattgccaccgtcctccggagggacgaaatagcccacgggtatatcgctggaaggagtgcatactctaacgcctcctctcatgctggtgcattttggctgcagcagtttgacattaaggatttcttcccctctatctcagctacaagactggagtccgctctgttagaggctggaatgggtgcgcgcgctgcacagtttgtgactagtctgacaacctatgggggatctcttcctctcggcttcgtccccagtcccctcctgtcgaacctggttgctaccgggatcgatgtgggcctgaacgatctggcccaacaacatgggttgactgccacccgctacgccgacgacattacacttagcggcccccacgaatttgattgtaccgaggagatcgaagcaattgcccaggcctcaggattcgccctgaatcctgcaaaaaccaaagcgggcgaagccaggcacggcgcaagagttacgggtttcgtggtcagcactggctccccaaggcttccacagcacgttaaaaggcagacacgccaggatctgttttctatacaacggataggaatcgagggccaagcctccatgagagggcgaactccacagtccttggtccggaggctgctcgcacgacttgggacactacggaagtgcgagcctgttgtgtacgagaggttgaagcgggattaccctcatgcttttgtggaccttgagagctacagaaccgacgctctagcagcccgagcccgaagagcagatgccctagaacagcagctgctcctcagcagtagcccggcaccagcctattatattcccacgcacccagctggccggtga

SEQ ID NO: 14373 - RNA, 1005 nt, synthetic construct
  source 1..1005: mol_type = other RNA
atgcggttgtcagctttgcaggaaattgcacagcgcttacgagcacaccccgcagccgttcatagcagacatctcctgatcaggggcaaaaagcggctggtgcacactccccgggatgaagggctcagacaagccttagtcgccctggtcggctgtatcgagttgcctatcgccaccaccatgcgccgggacgagattgctcatggttatatccctgggcgctctgcctatacaaacgcccggtgccatgtcggagctacatgggtccaaaggctggacataaagaatttcttcccctcaattagcgccgcccacgtagaggcagcgctaacagaggccggaatgggggaagacgcagctcgcttcattgtggcttttactacgttcggcggtagtcttcccctcgggtttattccgagcccgctcctctccaaccttgtggcgactaatatcgacataggacttttgagactcgccagagaacgtggactctgcgtgacccggtacgcggatgatatcactctgtccggggaggagttatttgattgtcacgacgatgtggccaccatagtcggcgagagcggcttcgctctgaacctggcgaaaatgtctgccggaacaccaaggaatggctttagagttaccgggtatgtactctcgactggcgaccctcgactgccacgacacgtgaagagagagacgcgccaggatctgtattccgtggagcgtatcggtatcacccagcaggctaaacataggggtagaacaccacagtccttcggcaggcggctgttggcacgccttggaagcattcgacaatctgaaccacttgtgtacgagcgcatgcgatctgactttcctctggcttttgagaggctggacgccctaagggagtcagctcgggttacccgtgaacagaagtccgccatgctggaaagggaactgcttagtatgcctagtgccgcacccgcttactacacacccctgcacccagcaggcagatga

SEQ ID NO: 14374 - RNA, 1086 nt, synthetic construct
  source 1..1086: mol_type = other RNA
atgactccccccacacatctggaatactccgtcgtggattccgtaggtgtcttggctggccagttggggcggaccgctgaagacctgttccagatggcggaggagatcgcttcaaatgttaggtacgaaacgcaggccgttcggatcagaggcaaagtgcgaatactcaccgtccctgacgatcgactgaaatacctgcagagggacatttgcgaattcttaatcccggccaacgatcggctgtcgccagaggtacatggttttgcaaggggcagaagcaacagatcaaacgccatcagccacgctggacgcatttatattcagcggtttgacttaaaggacttcttcgggagcgttaccagcgcacaagtgctggccgcctttcgcgaactcggactaagtgacccagcggcacacctactcaccgaacttacgacatatcgtcgcgcccttccacagggagctcccacaagcccgatcttgagtaacctggtgatgagggaggtagatgaccgcatgagagaactggcccactcccgcagtctgtccttttcccggtacgccgatgatatggcgtttggtggcaatgagaggttcgacctgtcatcagaggtcgaggatattatcgatgcttatgggttccgcctgaatgacagcaaaaccgcatttgccgggcctggccaacctaggttcgtgaccggactctacattgatgaggaccgagtcaggctccgtaaaagttttaagcgtaagctgacacaaacactccactacgtggaaaagttcggcatcgatgaccatgcagacagggtgggaaaagcaccatccaaggcccaggaacaactccggggccgcatacactatgctagacaggtggagcctgcatggcttgataagcagagatcttctttcccccgaactcttaatgagctggttccaatgaactacgaggccactagaggggagtacctgttagctcggagacagggatttctttctggcatggccgggatgactgccgcgtctgctttgcggtatgtgcccgcagtgtcttatgccgaggtgaagagccctgttgtggtctga

SEQ ID NO: 14375 - RNA, 1665 nt, synthetic construct
  source 1..1665: mol_type = other RNA
atggaagattactggtacattgtaatcggtatggttgccctgctagtgatcttctgtctgtgcataggatttagcggcggaaagtggaactatgccgcatacataaaagaaaagaatgagcgggtccaaaggaagagatggaataaatacgttaagttcctcgaccctgtcaaggagacggaactcctgaatattatcaaactcagttcagacgccgacttcgaagccttcttgaaagagattcaacctttgctgacaaagaagtacaacccatacaacctgaacgagcagacccttcttaagaggacaatctataacgtaatcaatcgctacaccactcaatttaagtacgaccgggttaagaaaatcgaggctatacttcccatgcttaaaagagtatttcttggccctcgcctgaccaaccaggtttattctaagaaaaccctgaagcggcgttttaaattcccactaaaaagcggggtggagatccctaagttggacaccatcattgatgtggctttcttttttaacatctccgtgaacaagattctcggactgtgttacatgcaagaaaagaatccgggggcgtattacgtgaaaagggagatcatctatgatcagatgggcgagaagggaattattttacaccaaaaggaccccgctatggtgcagctggacagttcttatgccatcgcagagccgaacatcctcaaaaagaagaaatccaaccagaatgaaggcaaaaattccgaggatatccaggaaaagctggaggaaattaaacctagtttcaaagagtacagctcaccattttacaaacggaaaatgctcacaaagcccgatggaagaaagagattgattgcctgcccggtgtcttatcttaaaaagtaccagcgcaagattctgggggatatattagagaaggtggcgctgcctacaaattgcacaggcttcgtgaagaaccgatccataatttccaatgctgcgaaccacgtcggaagccagactttggtgaagatcgatctcaagaatttcttcaactcaatgaagttctaccatactttcgaagtgtttcgcggttttggctataaccgccccgtctcggggatcttggcttgcatctgtaccgattggtatacaaagggcgggagatacgtccctcaaggagcaccatctagccccatgattggaaatctgtacgcactgcatctcgataaacgcttagaaggcctctggaccaaggctggttttgtctattcccgatatgctgatgaccttgcatttagtagttccgaccccaaagtaagggtgagagggctgatatttgccagctatcagttcattaaagacgaaaaactaagcccaaatcccgccaagactaaagttttacgaaaacagcacaagaagaaagtgacgggtattactgtgaacgagaagatcaatatcgacaggaggtggatgaatgcctttcggggcgagctgcatcgttactctaagttcggtctgccatcggatggcgtccagcgtagcaaaattttctcacagctgaaggggaaaatgtcattcctgcagatgatcgaccagaacaaggcacagaaatacgacctctattttgagaagatacggaccgaatatgccaaattgctggggaattcttcccagtga

SEQ ID NO: 14376 - RNA, 1617 nt, synthetic construct
  source 1..1617: mol_type = other RNA
atggacgctttccggtactctctctatatctctgtaggttttgggctgctggttttcatctgctgtcttctgtcctcgaaaaaacgggctgactatgaggattaccgaagagaaaagtggaataagtacgtaagctttcaagacccagaactcagaaagagcctggagcacgatataatcgtgtcaacggatgaggagtttgaggcctttttggtgtcattgcgtagttctgtgaagtaccgaagggataaaaatggccttcggatacgaaagaacatctgcatgttcatcaataacatttggatgaactcctactccgagaagggtagaaaaatctataagcggttgaagaagttggaagagatcgtcccccttctcaaacgcgtgtattttgggcccaagtatacccctattatttacagagaaaggaagtacgagaagtcttaccagaggcgtaaattcaacttcccccttcagcctgatagcacagctccaaaattagacaccatcatagatgtcgcctaccatctgcagacaagcatccggctcatcctggctattatctacacccaaagtcattccagagacaggaactatgttaaaataacccagattgacaaggcattacaccagaaaggcaactcttatctgagagtggtgggcagccctattgcacggcatgtggacattgatcagagcttcattttgaaagacaagagggggaaagttcccaaaaatgcaaaaaccactgatccccaggacgcctatctcgagtacaaggaattagattcgaacttttacacacgcaaaactttggtgaagccgaatgggcggaagcggctgattgccgttcctaacgagaagcttaggtcctttcagcgcattatactcaagaccatcctagagaaggcggctctcccagacgtctgtactggcttcacgaagacaaggtccacagtgacaaatgccgaatttcatgttggcgcgcaaaccctggtgaaggtggacctgcacaattttttcaacaacctaagtcttgaccatgtgttcgaagtatttcggggattcggatacaataggcctgtttcaggaatcctcgcaaatctgtgcaccgattactatcgatcccgcaggtatctgccgcagggagccagtactagcccaatgattgccaatctgtatgctctgcacctggatagaaggttagaaggactggctaacaaatacgacctgatttattctcgatatgccgatgacctcacattctcaagcaaagatcctaagatccgtgtccgcactttcatccaggccgtgtacaagatcatcaaatcagagaaactgtaccccaattatcagaaaactaaagtgtaccgcaagcaacacaagaagagtgtgactggtataaccgtcaatgagaaggtgaatattgaccgtaagtgggtaaacgccttccgcggggaactgtacagatattctaaattcggcgtccccgaagaggaccgctttagaatagtccaccagatgcacggcaagtttgcatttctaaaaatggtcaacccagaagtcgcaaaaaagtacgagacgcaaatctccaaattcattgcggagaacagctga

SEQ ID NO: 14377 - RNA, 1575 nt, synthetic construct
  source 1..1575: mol_type = other RNA
atgctgttagagggcttgtccggcgaggcagctggcttgatcatcattgcattcatgatattcgtgttttgtctttgcctggctaagctcctcggctattcagggtatcttcacggtgattatcgttggaataagtacatcaaaagcaatgaaccctctatagagaaagagatctactacaacatacaaagcctgagcgacgagtattttaaaacctacctgcagagtatcaggaagaccatcaattacaagtttcgaactggcgacaagagcctcaaaaacactattttgaagagatccatgttgaacatcataaacaagcatacaaacgagctgccaaatgagcgtatcaagcagattgaagaaatttttcccctcctgcgccgggtgtactttggaccgggacttaacaaagaggtgtacgacaagaaacatttcaagaagaagttccacttcaagttgaaaccagagcacaccatccctcaattcaattccattattgatcttgccttgtacttcaaaatccgcgttaatgctctactgggttactcttacaaccagaaaaccaaaagaaccgcgtactacatcaagaggaagaaaatgttcgaaaactttggacaaaacacgattcctgacgactatcgttacatcaaaaaatcctactcggaactgaaggaagaaaagaagaagaagtccaagaaacagcctgagatagagatcccttcttttaaagagcttgaaagtcccttctatacccacaaatttatcgaattccctaacaaaaagcggcgactcatcagtaaccccaattactggctaaaacaacttcagctgaagattctccgggacattctggagaaagtggagataccagattactgctatggctttgttcccgggaagtcgacagtggataacgctcgcattcacttaaaggcgaacacactcattaagattgacctgctaaatttcttcccgtctctgaagttttggcatgtcctgcacgtgttcagggggatcggctataataggcccgtgtcaggagtcctggcatgcctgtgtacagactggtaccattccaagcggtttgtgccccagggagctcctacaagcccgatgatagggaacttatatgcaagcagaatggatgtgcgcattaatggtctagccaataaatatgggctcaagtatactcggtatgccgatgatttaacgttctctagtatcaacgagaagatccaggttcggaagtttattgcctcagtctaccacattatccgcgacgagaagctgtatccaaaccttaagaaaaccaaagtctttaggaagggtaataggaaagccgtaactggcattatcgtaaatgaaaagctcaatgtcgacagaaaatgggttaactcactccgcggcgagctgtatcgataccagaaattcggactgccacagggggaagaaggagatatcatctataatcagctgcaggggaaaatagcctacctgcatatggtgaacccagagaaagccaacaaattcagcctcctgtttcagaagttgagagaactgaatagaaagtga

SEQ ID NO: 14378 - RNA, 1464 nt, synthetic construct
  source 1..1464: mol_type = other RNA
atggccagcgaactgacccttatcctggtgttcgtgggcctcgtgtattttctgatatttgtttgtgcggctgctgcatctaaaaggatgagatctagatatcctaaacccaaaccagggcatcgctacaggaagcttaagagggtacgtgacccgaaaattcaggcaaaagtacgggagaggctgactaagtgggaaggggcccagtacgaagagtggtacaaagacaccattaagaagatcaactacaaatatcggacaaaccagcgccagaaaaaatggaccgttctgaaacgagcagtcctggatatcatcaacaagtatacatacgagatacctgaggagcgactcaaaaaattttcccaagacttcccactcctgcggcgcgtttatttcggtcccaaactcaataagcaagtgtacaacaagaagaatttggccagaaaattcaaattcaagatcaaggatgggaccgagattccacacctagataacattgtggatatcgccctgttctttaacacatccgtcaacgtgctgcttggctatgcgtacacgcaggacctgtcaaacaagagttactacatcaagaagaactataccaagaaacggaagagaaaagactactatgagcagaagtccagattttataaccggaccacactgatcaagccagatggcagaaaaaggctgatctccagcccaaagtacaatctaaaaaaccttcagctcaagatcctccacgatatcctcgagaaggccgaactgcctgactgctgcacaggatttaaacctggtaatagtatcgtggataatgccaaaccacacataggtaagagcaccatggtacagattgatttatacaacttcttcccgtctttgaagttcgatcatgtgtttgaagtgttccgcggctttggctatagtaggcctgtcagcggagtgctggcaggcatttgcactgatttttgtaattcccctagatttgtgccccagggagctccgacttcacccatgataagcaatttgtacgcctcacacctagataagcgcttgaaaggcttatggacaaagcgtggtttcacgtatactcgatacgctgacgacctgacattcagctctgatgccgacgatatcaaagttgggaatctgattcacgccacttacgagatcattaaagacgagaacttgaaacccaattataagaagaccaaggtgtacaggaaaggacatcgtcacgaagtcactgggatagtcgtcaatgacaagttgtcggtcaatagggactggatccgagaactgcgggccgagttacataattataacaagaatgggctgcccgacggcattgagggacagcagattctcaacaagcttcaaggaaagatttcattccttaatatggttgaccccgaaaaggcagctcggtaccgcgcgcaatttgctgtgctcaccaaggactga

SEQ ID NO: 14379 - RNA, 1050 nt, synthetic construct
  source 1..1050: mol_type = other RNA
atgcttgaaagtcaagagaaattggacctgaatatgcacgacagtaacaggtcaaaactgaagattaaagaactcccactcgtcctgaacttgcgagatctgattaactttctggagataagtcacagccttctggagaactacttcacattcaagagttccctattaatctataagaccttcttcatcgccaaaaaatccggtggccaccgggaaattttcatccctgtgcccaaacttaaatccatacagtccaagatcctggtggaaatcctcgagaaaattaacataagcaagtttgcacacggcttcatcaagaaacgttctattgtctctaacgcccaagagcatctcgagagccaggtcatctataaaattgacctcgtggacttttttccctccattaagtttgataaggtgcacgaagtgtttaagaagatcggttatagcgagtatatcagttacctcttcgggctgctgtgtactcatctgcgcggatacaatgagatgtcacaagaaaaatccagcttaaatctcaacaagttgagattcttgccacagggggctattacgtctccgatcatctctaatctggtttgctcgaagttagataaggacctaaacaaaattgctaggatatacgggttcagatatacccggtatgcggacgatatagcatttagctcacagtacagaaaggacatcacaaacaagttcaggaagaagatccattccataattaagaagcacggcttcagcattaatcgcaaaaaagagtgcctgtcttacaacaggaattttcagcgggtaactggaatcaatgttcagaattcagaacttagcttgcctcgaaaatggataaaaaatctgagatctgccctgcatcatctggaaaacgattacaatcagatcgatgaggagtgcattgagattatgaaaaatatcgaaggacgctgtgcttacgcccttatggtgaataagaagaagtacaaccactactatcaggactttatctcgatcaaaaacaacatttccaagcggtcagagtga

SEQ ID NO: 14380 - RNA, 1077 nt, synthetic construct
  source 1..1077: mol_type = other RNA
atgtttaagctgtgcctctgtggggtgatcatcatgctgaaacctctgggctcacccgcaactctcttgcggaggcgagagctgagtcacagagagcttaataggcacctaggctcccagccgggcctcatttcctcaattattgagaagggagtggccaggcactaccacaaaaaaaccatactttctggtaaccgcttcatgcgccgcagtcatgacttgcaaaaaatgagagagatactggaaccccaggatgacctcaaggagatacaacgggccatttctcgggtgcttagccgctacttcgtaccccatgagattgctcacgcttacgtcaagaacagaggaatcgtgacgaacgcaacaaggcacataggcgcacgatccatgttacacatcgatctggcagacttctttgggagtatcacccaggaggctgttttgaacggcctttaccatgtgttggaggacttttacgcgtccgacatcgagacaatcgcagagctatgctgttatgatggcttcttgccacaggggtcgcctgcttcccccattctgagcaatctggtgtgcttcccacttgacatggaattaagcgaactcgctagatcatttggctgcgctctgacccggtattcagatgatattgtctttagtacagccacacgcagcctgcctagcaagttagcgcgtgttagcgatagagaggccgcctatactgtcaaattaggtcagccgctgcgatccctatttgagctccacgggttcgaacttaatatgaagaagctgcgtttccagaggtggccaggtcctctgaaagtcactggcgttctcgtcggagaacgtctgcacgtgccaagggaattcaggcataatatcggagccgcactctctcagtggaagagacatgggattgtggtggccgcccggaatcatcccaaaggatctgccgaagcctttgcgggttctctcaaggggtgtatcgaccacgtaggacatgttgaaggcagagacagcacccattatcgacgcctgctgatcgacttggaaaccctgatcgctcgggatctgaactga

SEQ ID NO: 14381 - RNA, 1083 nt, synthetic construct
  source 1..1083: mol_type = other RNA
atgcagtacaagtccttggaacgtcggctagggctggctactggtgccgtcagcaccgtcatgaacgccgacgctgggacaaggtacaccagattccccgtctcgcctaagcgcggcattatacgaaagccaggatggactcctaagaaacgcatgattctcgcaccttcaaaagacctaaaagcgatccagagggcaatcgctcgccatatcagctcaaagttcactgctcatcctatcgcccacgcttatgagaatggccggtccattttcgcgaatgcacgacaacacgtgggggccagatccattctgaaaatcgacctggtgaacttttttgggtccatcgggcgtcaatccattattgatgcactgagactgctgcttgacgatttcggcgacagagatattgaagtgatcgcagacctgtgttgttgcgatggctaccttccccaaggctctcccgccagtccggtattgagcaacctggtctgctaccccctggacgttgagctcgatcgactggcgaggcgccacggttgcaaggtgaccaggttcagtgacgacattaccttttctacatctgcagaggtttttccaccagtgctcgcaaggacgtggcggtctggattggcccatggagtggccttggaaagacccatctgtagcctgcttcagcagagaggattcgagattaatatagggaagctgatgttccggactagaccgatgcctctcaaaataaccggtctgatcgttacagatagtctcagcgtaccacgggccttttggcacaacctgcgcgcgagtcttcacaattgggaccgccgaggcttagatacgtgtgcccggacacatgctaacggatgcgttgtcgcctttgtgaattctttacgtagctccatcgagtatatcggccaggtgcagggacgggattgcaagaggtatcagagggctctcgccgcattcgaggaattacggtcaagggataaggaacccctctcagccgctatccagagaatcgctgccgctcgcaaagccaaaaaggccaaagacgagaacgtgataattccaggcaccggttga

SEQ ID NO: 14382 - RNA, 1071 nt, synthetic construct
  source 1..1071: mol_type = other RNA
atgtttaaggccggggtcagcaacttcgatttgaagcaagtcctcggtgcaggcctagaaacagtggatgagatcattgctaacaaggaaaatcacatcgagcggatatcaatccctaagaagaacggcggaaaacggaatattatagcgcccgacccgcagctgaagtatatacagaagtctatctactggcgcgtcttccgaagatacaaagcagatccatctgcccatggcttcgtgttaaagaggggaatcgtgaccaatgcggactgtcatgttggagcaaaatgcctcggcaaaatagacatcaaggacttttttgatagcattagtatcgatcacttgaagaattgcctatttggtaacaaacatatctgcaggtactgtaaatactatgagaggatgttggatggcaggtgcaacccatcattataccacaacaagacacacaactttgactttaaatgtgaggaaatcaaggccgtgcatattcctgcttattgcgaagagacagggtacatctctctctttaatcgcattatcgagctgtgtacctttgaaggattcacggcacagggctttcccacttcccccatgcttgctaatatagtgatgcgcggattcgacaaatcgatgaaagaattctgtgcgacggaggggattgcttacaccagatatgccgatgatctggccttcagctcaaaaaaccttaccaagttcgagcttaagaagaagattaagcagaaagcctatcaactgctgtgggcatacggcttcgcccctaacaaaaaaaagactatctggaagagtagcgccggccgactcaaaatttgcggagttgtcgtgaatgtcaagaaatccgtacagcggaaggacgtacataagttccgtgctgaagtgcaccacgccaccgtgaaaaatgctgataagactacaaagggggacctgagaaaactgaaaggttgggcatcctttctgatgtccatcgacccagttaaggggaagaaatatatgaaccagctcctgaagttcgaggccgacaaattcagtattaagagcaaagggatttga

SEQ ID NO: 14383 - RNA, 918 nt, synthetic construct
  source 1..918: mol_type = other RNA
atgaatatatacgaacttctcaataccacaagcaaggaagtgtcatcgattattctggagctcgaccagcactatctgagctacccaatcgccaaaagaaatcggaaaacgatgaggtggatcgatgctcctcagggcaagttaaaggagctacaggagacgttcctgcaccgctacttatataggttttccgctcatccctcttgcgtaggttttgtcaaaggaaagagtgtgcgcaccggagcagagcgccacatagggacagagcagctccttaacatggacctcaagaacttcttctccacgatcaaaatatataaggtggcgaagttgctgacatttctgacatcaagacactcaactatcactggaaaacaggtcacctttgttaatactgatgacaaggaaaagctcgcaaggctgctgacctataagaatacccttccgcaaggcgcccctagttctcctgccatcgccaacctgtgtgcctatcagatggatgtccaactgacagcattggccaagaacaatgggtgcatttatacccgttacgctgatgacctcactttcagcaccaagaagaccaaggacaagtttaacattatcggtatgatcccccagataagggagacaattgagaaaaatatgttctccgtgaactacaagaaaacacgggtgcagaaacaaaacaatcgaatgacagtaactggagtggtcgttaacaagaaactgtctaccccaaaatggtactggcgaaacttcagagcgaaactgcataacctggaaaaaagcggcgtgcccattactgaagaagagtaccaggaaatccgggggaccgctgagtggatcaaatccttgcatccagttagaggcgagaaatttttggaaactctaggcaagcttaatttaaccatttga

SEQ ID NO: 14384 - RNA, 915 nt, synthetic construct
  source 1..915: mol_type = other RNA
atgaatatatacgatatgctagcgactgataaacagacacttaagacattgcagacagacatcgataaccagtacctctcttaccctattgccaagaagaagggaaaggcaatccgatggattgacgcacctcaacccgagctgaaaactttccaggaggcctttctgaacagctttctctacaagtttacggtacatccctgttgcgtggggttcgtacgtggcaagaacgtcgcttcaggggccaaacaacacctcggatcgaaacagctgctgaacatggacttccagaactttttcggtgctatccacattggcaaagtcagacagcttgtgaagttcctattctctcggtataagaagatcacagacaacgtcttcacctttaccagctatgacgtggaattgtttgcagcactgcttacgttcaagtccagactcccacagggggctccaacatcaccagcaatcagcaatctctgtaccttgcccctggacaaagaactggccgccctggctgctcaaagcgattgcatttacacgcggtatgcggatgacctgtccttttccactaagcaggagaaggccgtgttcgacgtgaaggatcttataaaaccggtgtctaagaagatcaccagagcccagttaactgtcaattataaaaaaacccgcgtgcagaggcctcataaccggatgaccgttaccggtgttgtggtgaatgagaaactgagtactccgaaatggtattggaggaattttcgagccaaactgcacaatttacagatgagtcaggttccagtcacccctgaagagtaccaagagattcgcggaacagctgaatggattaaaatgctccatcccatcaggggccagcaattcttaaacactataggcaagctgaatctgatgttgtga

SEQ ID NO: 14385 - RNA, 984 nt, synthetic construct
  source 1..984: mol_type = other RNA
atgtttttacccttgactaccgatgagtttctggaccgaatactggtggtgaagaatcaatggaaacggtcaactatatactaccacgccaaagtgcagcactacaagaaacacgtgagagagaagaaaccggttaagaatatcctcgtcatgggagatgccccagtccccaagctccgagaaatcaatgaaccttgtcctgctttgaagtggatccaaggatatatactcaggatggtgcttgatcctgctactgaccagctgatgaaatgcgctcacgggtgtgtgccaggcagaagcaccgtgacgaatgctgcccctcacgtcaagtctcggtggaagatccatatggaccttaaagacttcttcccgactgttacggtacagagagtttacgggttgttccataaggtgtttaagtatggccccgacctgtcttggctgctggccaacctgacacagtatgagggtaaactgccacaaggcgcgcccacctcaccagctatcgctaaccacgtcgcaacacctatggatcgtcatctcgttaaactaatttccaaaatgggaggctactacacacgctatgtagacgatcttactttttcctttcctcgccagatgagtgacaaaaacaaaaccaggttcatcaagaccgttcgcgaaattgtggagagaaatggcttcgtcgtgaacgaggataaaacaagcattattgggcggggttcgaaaatgaccgtcaccggtattgtggtaaacgcaaagaccagcacaccccgttggtttaggcgcaacattcgggccgcactacatcagagggcgttaggggtaccatctgccgacaacgaccatgtgatcgggggcaagatcgcctatgtgaatatggtgtgccccgaacaggccaatgccttccacctgaagacatgccaggtcgatgattgcaagaagtgttacggactcgcaatgaagtccaagaacgcaagttga

SEQ ID NO: 14386 - RNA, 1554 nt, synthetic construct
  source 1..1554: mol_type = other RNA
atgcctactgagaaaaagaagaaagtaaaccccctcgacgagtacacggatttcggcactatcttagtgttaagtgagcgccttgcacagtacctcagactgctgttcaagctggacaaggcttcatggaattttgccctggataaaatccgacaggggaaagcctatcgcgaatggagaaagtttaaaggacgggggaaggggtaccgctactttgctgctccgtgtgccgagctcaagacagttcagagaagcatcaaggcgcagttcctcgatcagattccgatacactttagccggtatggctgccaggggggaactggcatcgttgagcatgcggccgcccatatgggcaacaaggtagcattcggtgtcgatataatcaacgcataccccaccgtacttcgctcacgcattcggaagtgtttgcagaagccctttcggtttatgttgagacaattcggagatgtcacctggctggaggacgatgtgaaaaatatgcttgaggctgttgtggacctgctctgcctgcacgaccgtttgcctcagggccctccaacatcacctcgtattctcggcattgtgtgctacaagatggataccgccattttcagttacttacacgagtcctccagcccccttcagggcttcaacatgacatcttggtttgacgacataaccgtcagctccgataaagagattcccgaagagatgcgggccaaaattctcgccctgattaaggaacacggtttcatcccccatactaggcctgacaagaccaagtactattcacctgaaacgggggaggtgccaattgtaacagggatcgtgatatgtccagatggtcgtctgactatggctccaagaaaagttaaccagctaagggcagcttttaataactggctcaaaattgaagtctgggacgaacacatcctgggcaaggtgaatggcactttgggagcagtccgacaactgtatccagaaaagctgccaagcaaactgagggtgcttgtggggaagattgaagacaggcttcacgccgggaaggttgcaaaatctctccagtatttggacaatgcactgctaccgtcgggactgcaggatcttgcgaaacagcttagcatggtcgtcatcgacggtcaaggagacgtgagctctcaactcctgggcgacaacctactcttcgtggatggcgccgcgaggaaatcttatcaggccgggatcggagccgtgctgataaaggaccgaaccgaagtctccacaatcagtcagttgatcggaaaagcaaccagtaatcaggccgagtatcaagctatcatcgtgggtctgacagctgctaaagagctaggcatcgcggaattagattgcttcaccgattctatgctggtagtgaatcagctgaacggaaagttcgctgtgtcgaagccccatttacggacgctggtggcccaagtcaaggcattggtgaaagaaattggtaccgttaggtttcatcacgttcctagagagctcaatacatccgcccattccctggcccacatggctctgaaatga

SEQ ID NO: 14387 - RNA, 1125 nt, synthetic construct
  source 1..1125: mol_type = other RNA
atggccaagaggggcaagaggaagaacaaaaagcccttcgtgtttaaagacttcgaaactgtcttagcacttcccgagcgactggccgaattcttacgcctccttctgaagttggataaagctacctggtccttcgccctggataagatcagacaaggcgccgcataccgcgaatggagcaagagtaaaggtccaggaaaagggcggagagactttgctgctccatgtgcagaactgaaggccgtgcagcgggctatcaaacagcagatgctggatgtaatccccattcactttaccaggtacgggtgttctacgggggttggaatcaaggagaacgcagccgcacatgtcgtccccggcgtatccgtgtgtgtgaaggagttcgacattatgaatgcctttcccaccgtgttgcggtcccgcatccggaaagtcctccagaaaccattccggtttctactggaccaatttgccggtatggagtttggagatgatgatgtgaaactgatgcttgagtccatagtggatttggtttgcctgcatgacaggcttccccagggaccgcctaccagtcctaggctctttggcatcgtggcgtatcgcctggactgcgcgttgttccgtttcctccacgaaaactctacagagttccaaagctacaaaatgaccagctggtttgacgatgtgtccatttcttcgcgtgacgaaattccagaagaggttggggtgaaggccgcaaaaataatagaagagcatgggttcactgcccaccaccgaaaagacaagtctaaatactattcacctgctacgggaactgttccagttattacaggcctcgtcctatgcgcggatggccacctcacaatgactccgaacaaggtgaatcagttaagagcagccctgcataaatggagcggagagaagagttgggacgaggccaccctggggcagatcaatggcacactcggttgcattaaacaggtatatggcgataagcctcctagcaaactgagaaagtcagtgcgagagattgaagctaggctggctatgatgaagatcgagaagctgcaggctgacgtcgctcgcgccagagtcatgcctaagaagaagtcaaagaagaaatga

SEQ ID NO: 14388 - RNA, 1365 nt, synthetic construct
  source 1..1365: mol_type = other RNA
atgatgggcaccagtaggttcatggtgtctctgccctgtataatggcttctagcttcaaacgcgagatgggcaagatggcgaagaccaagcgccgaaaaaagcggaagagggcagaatggacatgggtcgactttcgggtgatccttgatctgcccgagaggttaagtagatatctgcgtgaactcctgcatttggataagccttcctgggactttgcgctcgaaaggatccggcgctacaaacaatggcagaatgaaaaaaaggagaagccagatctcggtcgtcttccccgaactcaagtagcttactttgaatggtcgaaaagtaaaggaaggggcaaagggcggagatatttcgctgcaccatgcgcggagctgaagctggtgcagaaagcagtgctgaataggctcctggcgtccatcccagtccacttctgtagacatggcaatcagcctggatcctcgattctgagcaacgccgcccgccatatgggcttcgccaaaagcgtgttttccatagacattgtaaatgcctttccgacagttttcaggagcagggtcttcgccaacttgaaaaagcccttcaagtttgtgttgagacagttcgccggagtggaattttctgaagacgacatcaagcagatgctagaggttctttgtgatctgatctgcctacacgaccgactcccacagggtccaccgacctcaccccgtattctggatattgtctgtgcaaaaatggatcaggagttgtacgctctccttgagaagaattccacccctttccaatcctatagaatcactgcttgggccgatgatattaccatctcttgcgacggggagatacccgaggagttgagagaacagtgccttaaggttattaaagacaacgggtttatcccgcacacccgggaggataaaacaaagtactacagccccgagactggagaggttccagtagtcactggcctggtgctgacctctgacgggcggatgacgatggcccctcgcaaggtgaaccaatttcgggccacactccaccaagccctaaagcgaagtgagtgggacgcacagatcagaggtcagattgctggtacgatggggtacatcagacagatatatcctgacaaactgcctagcgcactgcgcgaattagtgcctcagacagaggctcggatgcaggaagagtgcaagaaggcattacagctgaacggagaggccactcctactgtgcccccaaactcactgcctaaaaaaaagggcaaggccaagactaaacccgctaagacaccaaaatcccgcacctcagatgaggccgaagaatcttcagctaccgagacagtcctctgtgaaatgcagagctga

SEQ ID NO: 14389 - RNA, 1314 nt, synthetic construct
  source 1..1314: mol_type = other RNA
atggcgaagaaagccaagaagcccagagggaccgctccagaagaacaaaaaaaaagaagaagacgacggaaagaatggacctttacgaactttcagaacgtgcttgccttgcccgagaggctggccacctacttgaggctgctgctgcatctggacaagacatcctgggacttttgcctggataaactcaggcagcatgtaaaatgggaagcggaggttgaggacaagcgacctaaagtccaaatcaatgtgaaaggcagagaacgcacctcaagatccggacccgcttatctggcatggtctaagtccaaagggcgcggcaaaggccggcggtattttgcagccccctgtgatgaactggggagagtacagaaatctatactgcacaggtttatttctcaagtcttcgtgcacttcgccaggtatggcggacaggtgggcagcagcattatggccaacgccggacaccatgctggtttcgccaagtcggtgtttagtctagatatagtcaatgcatacccaaccgtgtatcggtcccgtgtgcgcgctactctgcggaagccgtttgagtttgctctacggcaattcaagggagtcacattcagtgaggaagatgtgttgaaaatgctcgactccatcaccgatcttatcgtcttcaaggaccgcttaccccaggggccaccaacatccccccgtgtttttgacattgtgtgcggtaaaatggatcaggagatttttcagtggctggagtctaatgccacgcccttccagggataccgctacagtgcatggaccgacaatctgaccataagttcagatggagaaatcccactcgaggttcgacagaaggtgattgaaatcgtccgcgagaatggcttcttcccgcacatgcgagaagataagatgaagtacttcagcccagagacaggcgagcgccccatagtgactgggctcgtggtgttacctgacggcaggattactatggcacctcggaaagtgaaccagcttagagctaggcttcaccagttgatgcttcgtaaagcgtgggacaaggaggctatgatgctcatcgacgggacaatcggtttcgtgagggagatttaccctaagaacctgcctagcaagctccgagacgtggttttagccgtagaggcacggagagcttcaatgagggtcccagtagtgcatgatgagagcatcgaggatgaggatgccatcatgctcgatgaagaccctgaaacaaaggttccgtctcctagcaagaagaaggacgagggtcctactgagactgtctcagaagttgtcctgatgtga

SEQ ID NO: 14390 - RNA, 1311 nt, synthetic construct
  source 1..1311: mol_type = other RNA
atggctgagaagccagaaaagcgtcgccagaggagacggaaggagtggaaatacgataactttgccgcagtgctggccttgccagaaaggctcgcccatttcctccggctatggctgcacttagacaagagcacttgggacttttgtttggataaactcagacagcatagagcatgggacgagcaggtggcccagtttagggctcaagaggggaagaagagaaagaagggggaggccgaggtgccaaaacctccgaggtgtggccccgcttacctggaatggtccaaatcgaaagggcgggggaaaggtaggagatactttgccgcgccctgtgaggaactgaaggtggtacagaaagccattaacaatcgcattctggcacacatcacggtgcactttgctcggcatggcggccaaataggctcaagcattcttacaaatgccggacatcacgctggttttgcgaaaaccgtgtttagcctagatatagtgaatgctttccctagcgtatacaggtccagggttaaagcggtcctgggcaagcccatcagattcggattgcagcagttcgcgggtgtggccttctcaccagaggatgaggaagccatatgcgcaagtatcgcggacctcctggtcttcaaggaacgcttgccccaagggcctcctacctcacctagagtctttgacatttgctgcggtaaactggaccaggagatcttcgctctgctgcagggacactccaccccattccaatcttatcgatataccgcatggacagacaatctgaccttctcatctgatggcgagattcctgaacccgtgcgggagcagctggtagaactggttcgcaaaaacgggttcttccctcacacacgaccggataagatgcgttactattcccgcgaaactggagaggttcccattgtgacaggtttagtcctgggcgccgaaggaatgctgaccatggccccgcgaaaggttaaccagcttcgggcaaggctccatcgctttgagcgcctcgccaactgggacgatcagatccaaggagaggtggcagggactcttggctacatccgacaggtctatccaaagcgtttaccaagtaaacttcgggatgtcgtagctgccatcgacagcagattggcagccaataaggctgtgacgactgaggtggccactgctccaacacctgcaccctctacccggcctaagacaagtaaggcccccggaaaaagcaagggcaaagctcgagctaaatccgcaggcaagcccaaggtcaaggaggaacttctcgccgaagcagtttcttga

SEQ ID NO: 14391 - RNA, 1239 nt, synthetic construct
  source 1..1239: mol_type = other RNA
atggcaaaagggaagaaggtaaagaaacagaaacttcaaaagaccgacgtgaaagacttcgaggccatcctccaaattcctgaacgtctcgcacagctgctgcgcttactctttcatttgagcaaacctgagtgggatttctgcgttgccaagatcagacagaaggaagcgtatagagaatggagagagagcaaagggcctggaaagggtttccgacagttcggcgcgccgtgtgctgagctgaagctggtgcagaagcggatcctgcagaacttcctggctaacgtcacagcccactttattcgtcacggtaatcagccaggttcctccatgatgaccaacgtgcaacaccatgccggattcgccaaggccgtgtttggcatagacctggtgaacgcattcccctctgtatttcgctctaggattcgggggaacctcagagtgccactggagaggaaaatttctgagtttggcgaagaagtgaataaatccctctccgatgaggataagaagattatgcttgaggccgttgtagatttcttgtgtttacatgataggctgccacaaggccctcccacgtcacctcgagtcctagatatcgtttgctttgcccttgaccggtcgttggccggaattgccgctaaacacagcaccccctttcagcagtatcggctgacagcgtacgccgacaatttcactctcagttccaatgacgaaatccctgaggaagttaagactgaggttctagaagaaataaagaagcacggctttatcgcacacacccgaccagataaaactgaatactactcaccttttacgggaaaagtcccagtggtgaccggcatagtgcttcccacaaccgccgacgggcatatgaccatggcaccacgcaaagtcaatcaactgcgcgcacgcttacatcagtacgctgagaaatcaacatgcacagatgaggaacggggtgtggtgatgggcactatcggatatattaggcaggtctaccccaagaaggtgccaagcaaactgcgagctctggtggagcagattgagacgagggccagaatagagagattgcctgctcctgctgtcccgatcgaagctgttccgaagaaggtaggaacagacatcgatctttctgtcatccccagtgctgacaccgcaaaacccaaaaggaaaaagccaactcccaagaaaagtaagctcactaaggactattgtggggagagcctgcccttctga

SEQ ID NO: 14392 - RNA, 1281 nt, synthetic construct
  source 1..1281: mol_type = other RNA
atgaaaatcgctaaactctgcaggtggctgtggctcgtgaatgggttacaactcaacaagaagcgaaggccaggagtagctaagaaaggaaagaataagcggggcaaaaggcagaaaatagtgggcgacgacttcagggtagtcctggacgtgcctgagcggcttgtgctgttgctgctccagtttctgcacctaactagagcgaactggtccttcttgatggatcgcatccgccagtacaaaactgatgggaccccagtctacaccgagtggtctaagagtaaagggcggaacaagggccggagatatttcgctgccccttgcgacgaactgaagctggtgcaaaaggccattttaaatcggttcctgctttccgtcccggttcatttcatccggcacggtggccagcgaggttcctcgatcctcactaacgctgagacgcatgcaggctttgctaagtccatgttcgtcgtggatataattaatgcctttcccacggtattccgatcacgcattaaggctaatctacgcagggcatggttagaccactgtcgaatgtttgagggagtcgagttgtctgaagcggacaaggagatgatgctcgaggccattgttgacctagtcgcctggagagacagactcccacagggacctcccaccagccctcgtgtgctggacatagtctgcctgcgcatggatgagcagctgtatgaactgttctatagtcattctaccccctttcaatcgtaccggtccacagcctatgtggatgatctgactttcagctgtaatgcagattcaatccccgaagagttgagaagtgaagccctggaaatcgttagacagaacgggtttttaccacacacaagggaagacaaaacagtctactatagcccagagactggaagagttcccgtggcacttggcctggtgatcggtcgggacgggcgaatcaccatggcaccttacaaagtgaaccagcttcgctctaggatttacacccttttgaccaaaaagggcgagctggatgatgtaagtcgtggtcaactccagggcaccattggctttattcgtcaggtgtaccccagaaagcttcccgccaagctccgccagatcgtggaacaggcggagtggaggctgtctgccgaaaaatcaggggccacggttacaatagttgtggaggcactgccagagctggagactcctacaagcgaaagcagctccgaaggagtgacatctagcccgacacaagtgaaagaggctatggaattgtcagcctga

SEQ ID NO: 14393 - RNA, 1224 nt, synthetic construct
  source 1..1224: mol_type = other RNA
atggccaaaaagggtaagaaccggagagggaagaggcagaaaatcgttggcaatgacttcagagtcgtgctggatctgcccgagcgtttggtcctcctgctgcttcaattccttcacgtgtcacgagctgactggacctttctcatggaccgcatacgacaacataaaaccgacggtacgccgatatacacagaatggtcagagtccaagggacggggtcgcggtaggaggtatttcgcagcaccttgtgaagaactgaaactggtgcagagagcaatcttgcaccgcttcctgtctactgtgcaggtgcactttgtgcgccatggcaaccaaccgggaagcagtatcctcacaagcgctgagacacatgccggggcaaaaagtatgtttgccgttgacatcgtgaacgccttcccatcagtcttccggtcacgcattgaagcaaatctgaaagggccctgggaacacgcctgcaggatgttccagggcgtggaactgtccgaggctgacaaggagatgatgctggagacaattgtggacttagtagcgtggcgagatagattaccccaaggaccacctacctccccgcgcatcctggatatcgtgtgtttgaggatggataaacagctgtacgagctctttatttctaatgggaccgtgcagagttatcgttctacggcttatgtggacgaccttacctttagctgcaatacagacagcatacctgaggagttgagagaaaaggccctggaaattatccggaagaacggctttattccccacaagcgtgccgataagactgtttattacagcccagaaaccgggcgagtgccaatagttttaggactggtcatctgccatggcgggaggattactatgacgccccggaaagtcaaccagctacgggccaggttacacactctcttgacaaaggagggagaacttgacgatgtatcgagaggccagctccaaggcacaatcggattcattagacaggtgtacccaaagaaactccccgctaagctgtgtcagattgttgagcaggtcgaaaggcggctaaccgctgagaagagcggcgccaccgttactatcgtaatcgaggcacttcctgagctggaaacttctaatgccgatcccgagctcaaagatgccgctgtgcctcagcaggatgtcggcgagtccatggtcagtccagcttccgtacaggaggtggcggcgccttga

SEQ ID NO: 14394 - RNA, 1245 nt, synthetic construct
  source 1..1245: mol_type = other RNA
atggcaacctcaactcggaggcggcgaaggcacacacctaaggagtgggtgtataaagatttcgagtccgtgttggagttacccgagcgcctggcacgaattctgagactgctactgcacctctccacccaggagtgggacttttgtcttgacaaactgaggcagaaggccgcttacagggaatgggccgaaagcaaagggccaggtcgtggcgttcgacgatacgcagctccctgtgatgaactgaagagcgtccaacggaaaatcttgaatcgctttctcatctccattcccgtgcatttctgcagacatggaaatcaaagagggtgttcagtgaaaacaaacgctgagcatcatgctggaaacgaaagagcgttcagcattgacatagtcaatgccttcccatccgtgtatagatcacgcatacgggccaatctgcgtaaacccttcacctttgctctcaaacagtttagcggtcaaacatttgaggccgaggagattaaacagatgctggaatccctggtagatcttgtctgccttcacgataggttgccacagggacctcccacgtcgccgagaatcctcgacatcgtgtgctgcaagatggaccaggacatttggaaattaatctctgagaacagtaccccgttacaggagtacaggataactgtctggtgtgacgatttgacaatcagttttgaagaagaaatccctggtgagcttcggaagaggatactcgcagttatgaagaagaatggctttttcccccacgagcggaaagataagaccaagtacttcacccctaaaaccggcgccgtgccggttatcacaggaatcgttctggcacccgatggcaggatcaccctagccccaaataaactcaaccagttccgcgcgaggatcaacaagctgctcgccgtgattaaagcagaacctaccaagcaagtctatggcgaaatagctgggacgattgggtatctgcgtcacatttactctgacaagttgccaagcaaggtacgggctattacagagaaggcggagactgagctgaagaccatcaagttcaacgaacttgcaggggaactgggcaagaaaccacggcgacgcaaaaagacgactgccgtgactcccgagccacagacttcagaaacttctgccgagacacagattgccaccgaggaaccacctcgcagacgcagtagaaagaaaaaggacacagctgatgagtctatcccttttaagtga

SEQ ID NO: 14395 - RNA, 1371 nt, synthetic construct
  source 1..1371: mol_type = other RNA
atgcctcgcaaaaagacacggaaaaagtctaggaacattgcacgcggcaataacttcgtgaccgttctatccatgaacgatgatcgccttgccaagaccatccgccagattatcagttttcaaaaaggagactgggatctactaatggacgtactgcagaattcctttgtgtatcgagtggagcgaatctctaaaggcatcgggaagcctcccagaattgtacacgctcctaacggcctcctgaagaaggttcagagaaagatcctcaaccggtttctgagtgaaatccccactcactctgctaggcatggtggcggacaaaaaggcacctcaaataagactaatgcgttagaacaccaagacaacgcctatgcattctccacggacatcatgaatgccttcccgagtattctgaggtctagggtcagggcttgcctcaaaccacacttgaagcgagtgctctaccagtttcggcctctcgtctttgagtttgaggagaagcgtgacccacgggagaaaccgacttgtgatggggatattgtcctcgaggggttgattgacctgctggtgttcgatgacagacttccacagggacctccctcctcaccaagactgttggatatcgtgtcgtataaaatggactgcgatctttggcgccttgcccaggagtccagcaacttaggtgacgagtacgtctatacagcttacgtggatgacctgagcttcagcagtgcagttcccatacccgaagaagtacagcagaagatgttgaccatagtgcgggacaacgggttccacccccaccacagccccgagaaaactaagtaccatggccctgataccggcagccatccagtgataacaggcatcctgattagagatggtatgatgcacctgcctactcggaaacagaatcagttgagagcacgtctgcacaaccttaatgtggctaaggaagcctggagcgacaacgagcgtggtgaggcagctggactcttagggtttatccgccaaatataccccctggattcccataggaaactgccgtctaagctcaaagaccaggttctgttctcagaaaatcgactgcagcagagaaaggtcgtggtaagcgaaacaccattcggcattccagtggccgaggaagacgtcataacaaaggtgtgtcagaataacccatcaatcagcgattttaatgcgctggccgtctcaacgagagttggatggacttcccatagtggaatccccttcacggggaccattaccgaacggttccctgacaagcctcatctggcccaggttacctacctttctaaggggggcaaaaggtgtggaacacgcctgaaatgccaaaggttggccgtgctctga

SEQ ID NO: 14396 - RNA, 1263 nt, synthetic construct
  source 1..1263: mol_type = other RNA
atggccaaaaggaaacgcggtggagccgctagtgcgggagatgctcccactgcaactctggtggcggacgacgatgtggcccagaccttccagaaaatcttcgctgccttgagtgaaccggctatgacatttctttcgcaatggctgggcatccctcgcaacgccacagatcgaggcgttggattggcccgaccatatacattggcagatgcggctgctatcctcgagaacggtactccatataggcgctactttagacccaaatccgggggaggcgtgcggcgtataagcgaacctgctgcttcagtgaagcatgtgcaacgacgtctgctgcacgtggtcttcccgagcatcccggtacaccatgctagctttgccgggctgaggacccggtctgccattgaggcaatagagtggcacgctgcccaggggaagccttttttcaaagtcgacctaaagaacgcataccccagcgtgtcccggaccaggctgaccaaggtgctacggggccccttgcaggagtatcttgctcgcgccgccccccatcttgtcgcagaagagtacgaggccctcatcaattttgtcatttccatttgcctcgatgcgggcggattagcacagggtgccccaacatctctccacctgatgaatgcagcaagattcgaactggactgtgccctcgccgcctatctcaggagtctgccagggagctacacgtacacagcctacgtcgatgacttaattatctctagaggggacgccacggagattcccgagtacgtccgagagagaattgttcggatcgtgcttgcccatggtttcctggtaaatcgctccagacgcaaaagaaaggtggactattggcctgctggaactggagcaaggaggccagttgtgctggggctagttccacaccgggacggtagggttaccatttccgcaaagaaccgaaagcgcttcagggctgccctgcaccacgcactgtcttcccctgaaagctcagatgcgcacagagcccaagtagccggcgtgatgggctacctgcatatggtatatggcgacgaccgcttaccaagtgagttgcgggtgctgtacgctcagtgtagagaaagatttgggcggccaaagactcctgggggcgcttatcctgacatcgattgcctccttgccgagcagcaccccggagaaggcaaagcagcagacccccattcagaagtcgatgatgcgcgtgcctcaggcaagccccctaccgattctgcttga

SEQ ID NO: 14397 - RNA, 1212 nt, synthetic construct
  source 1..1212: mol_type = other RNA
atggctgagcagagcaggttaccaatctctttcctcctggatgccaggctggaggaggtgctatgtcaaatactgaaaattgatcccgccgaatggagagcaaccaccgccctctgggcctctggcaatgcgtggacgatccacaaaataccgaaaaagaaggggcacagaaccattcatgcacccagcgacccactgaagaaggttcttcgggcgctccttactcagtttatccaaggcattcctgtccatctcgctgttcatggggctcaccccgggacatccattgtgaccaatgcccgcgctcatgttggaggaaaagcattctacctgctggacctgaaggacgcattccctaccgtgaacagaaaacgttgctcagcgatattcggacccactttcactggctatatcacagtcgttacgggcttgccagaacaggacggtaagaggcttgctgagacatttgttgatcttttgatcgtagacgacgttctgccgcagggctttcctacttcacctgctgtcttgaacgtgctcctaggccaggtcgacaggaacatatcgcagctcctgcgatcagcatctgccacagagggggtggtgtacaaatacactcggtttgtggatgacttaacaatttcatcctccgacgaggtgatccccaagaagctgagacagaaaatcagacaggcggtccgaagcgatggatggactattcagggtaccaaagtcagttattttggggacggggccgaaggtgacgaggaaagaaccaccaagtatccagaagtaacaggaattatccccaaccaggatggtcggctgacgattccacggccacgactcaataagttccgcgccatcctccacaatctactggaggtagccgataaacgccagagtggagatgaggaggcactgaaggcagtgaaagcccaaatggagaaagatgtggtggcctttcggaagcgcgggatcagtttggacagcaacttgagccctgacaaattctatgctagggagtggcccctgaccacaagggaacaccgccttttagtgggcatcgtgggcttcgtgagcatggtatacgatcaaaagctgccttctagtattcgtgaactgtacatcaaggccaagactcagtttcggattggcacccgtgatatctcccaaggacacgcttactccttcgtcaaggaaacagaatga

SEQ ID NO: 14398 - RNA, 1194 nt, synthetic construct
  source 1..1194: mol_type = other RNA
atgccaagttcttttttactcgatgctagcctagaagagactctgtgccgtgtgctgaagatcgatcctgccgagtggagagccacaaaagctctctgggagagtggcacggcatggacaatccatcacatccccaagaaaaatggtgtgcgaataatacacgccccgtcggaccctctgaagctggtcctaaggtccgttctgaaactgtttctgcagtgtattcctgtgcatatggctgtccatggagcccatccagggacatctatcgtgacaaacgcacgcgcgcatgtgggggataaggccttctacttcctcgacctcaaggatgcgttcccttctaccaatcgaaagcgttgtgcttctgtcctgggacctcgccttgccacacaccttgcagatgcaaccgatttatcagaaaaagattccaagcgccttgccgagactttaattgaccttctaatcgttgacgacgttttgccacagggctttcccacttcccccgctgttctcaatgtcgtgctcggagcagtggacagagtgctctcacagctcctgagggccgagagcgagaaggaaggcgtagtgtaccgatacactaggttcgtggacgatttgacaatttcaaccgatgctccagagattagcaagaagttgaggcaaagcattaggcgggcaataacccacgatggctggaccattcaggggacgaaggtgcactatttcggggatgcggaagagggggacgaggaacgcaccacgagaaaccctgaagtcaccggaatcatacccaatcccgatggtcggctgaccatcccaaggccaagacttaataagtttagagcaatcctccacgacttgctgactgccagcacacaacgccttgaaggtgacgccgaggccttgggcaaactgcaggctcagtttgacctgttccgggagctgtgcaaaaaacgcaaggtctggatccagccgaacttgaccttacaggagtggtgtggcaacgactggccgctgtcccctcgtgaacggcaaattatcgtcggcattgtgggattcgtaggtatggtatacgaccagcaactgcccagtattatcagaaaaccctataacgaagccaaagttcggtttggcatcggcctgcgggacatggctggaatcaatgggtataacctggacactgagatttgctga

SEQ ID NO: 14399 - RNA, 1026 nt, synthetic construct
  source 1..1026: mol_type = other RNA
atgtgtgtgaattcttcaacagcggcccggtttgctcagcaagaagtatttatgacagacccttctgcggctcctgcatccttccacaaactgacgcccatgattgaacgcactttcgtcgagttgattagggaaactgaggccgtctggagttggtgccaccagctgtataccgatggggtaccttgggaaatgagacggatcccaaagaaaaagggatttcgcactattcatgccccaaaggatcctctcatggccattagcagagggatattgcatcatgtgctcagacgcctcccagtgcatagatccgtgcacgggtccgagccaaggtccagtgtgatcaccaatgcacgagtccacgctggcttcgcaaaatctgtctacaacttagacctggagaacgcctttcccagcaccaatcgtaagcgtctggttgcaaacctgagcccgaaaatgctggctcttctgctggactcgaccgatctttccgaggaggaggcatcagtgcttgtggagttgttaatcgatctgatgctggtagacgacatcttgccccaaggcttcccaacaagcccagctgtgctgaatattgtattgctcccggtggacagggagattagccggtacctccgacaggtcggtgaagaactaggttgcgagctgcggtatacccggtacgttgacgatatcaccatcagcagtgatggcgacagaatccccaaacccgtcaggaatcagatacgcaagatcatccgtcacaacggatggaagattaaccagacaaagctgatgtaccacggggatgccgagcctggagatgacgaacgctctactaaaatgcctatggttacaggcctagtgatacatgacgatggacggctgacggtcccccgatggaagttaagaaagtggagggccctgatgcacgagctccttcaggccgaagatgtgtcacaagaccagagggataccctagtgggtgttgtgtcattccttactatggtttatgacggcgacctctga

SEQ ID NO: 14400 - RNA, 1188 nt, synthetic construct
  source 1..1188: mol_type = other RNA
atggccttgaagataacctgcccccagtgtactgcagaatttttcgttgtggaggccttcagcggtagtaagattgtgtgcccccagtgcacatccgctattattctagcattaaaaactcagcatccttcgacacatatctctggtcctaaagcgatcctgccttctcagatgctgaacattaaggaggaggcaatccgtcacttagagatctggctggacgttccgtctgtttctatcaagaatgccctgtcgatgatagaacaagataaagcttacgaggtgtggaagattcccaaaggcgaaagcaacacgttccgagaaatcgcggctccagccgacgtcctgaagcacatacagcgacggattctggacagactcctgtatcggatcccagtcagtaacgcctcccacggcttcattcagggtaggtccatcgtcaccaatgccagcttccacctcaagacagccggggcagtgctgaattttgatctaaaggatgctttcccctcagtagatgcccagcgcatcaagcatttgcttgtacggtacctgaagattcccctcaagcacttggggggaaatattccccacgaagccctggaccaagccattgagatgctggtcaaatttaccacctataaaggagctctccctcaagggggcccagcctcaggatatctgcttaacatagcatgtatttccctggataaaactatctactcacttctccagtcttatggcaattcctaccgctacaccagatacgctgacgatatcaccatctcaagcccaatgccctttccccagggccttcaggaggccattgagacagcgattcataacagtggtttccagatcaatcctaagaaggtcaggtacgctgtgaggtcccaaggccagagactcgaggtgactgggttgatcctggaaaaagacaaagtgcgtattccgagccagaaaatcgaaatcttccgggcaattatccaccaagctgggagtcttgagacgcagaacctccaacctgagaaaagattggagatacagagcatcattgcctttatcaaaatggtgtatggcaagatcccataccgcatatggggaccatacaaggcttacatggaaaagcatggaatatttatgcctaggaaaacatctaaggcatatctgagcttatatccacactga

SEQ ID NO: 14401 - RNA, 1212 nt, synthetic construct
  source 1..1212: mol_type = other RNA
atggcggttgaaatccgctgcccggaatgtggcgcagccttccaggcagaggatgtatttcccggcagtcgagtgagttgtcctagctgcgaggcgattctcattctggacgttgagaaacaacggctgtccagaaaatctattgtgccaccagtgcccgggcccaaaatatacaagccagaggaccaggattctctcaaacgggctgcgattaatcatctgagcaattggctggatattccagccacacagataaatgaggctctcgcatcacttcagaaaggagagggttacaacgactggaagatccccaagggtaacgaatattccttcagagagattagcgcccccattcaaatcctcaaagacatccagcggcgggtgctggatagattgctgtacaggattccagtgtcaaacgccgcacatggctttattaacggaagaagcatcgtgaccaacgcttcttatcatcttgagacagctcagtccatcctgaatattgatttaaaggatgctttccctagcgtgaagaaggaaagggttaaacacttgttcgtccgctatatcaaaatccctctgaaacacctgggtgagcagatcgatcatggcgttctaaataaagtagtggacatcctggtagaattgaccacgcacaatgggggcttgcctcaaggaggaccctgctccggatatctgttgaatgtcgcctgtatcaccctggataaaagcatctataggctgttacagactcacagtactcaatacatccagtaccgctatacacgttacgccgacgacatcacaatatccgccaatgccccaatctccaatatgctgaaatcggagattcagaaggctatactcaataacggctatcagattaaccctaagaagatacactacgcagaacgaaagagggggcagaagcttgaggtcacggggcttatcatcgaaaagaacaaagtccggatccccgcatcaaggctggacaactttagagccaacattcaccaggcctctctcatgaacaccgctgacctcacccctgaaaagaagctagaggtccagtcaataattgcctttgctaagatggtgtacggaaaggtgccacaccgtctctggggcccgtacaacacttatctagaaaagcatgggcttactcaccctttcgggcgcaagggcttacaatgggaccagtacccctcttga

SEQ ID NO: 14402 - RNA, 1197 nt, synthetic construct
  source 1..1197: mol_type = other RNA
atgtcgattaaggtacagtgccctcagtgtaatagtgggtggaacgtgacagaagctttccccggctctatggttcactgcgccaattgtggctgcgcagtgctgctcgccatcactccaacctatacatcccagagattccttactccagcacctcaagtgaccgggccttcacagcaggaagtcctcaaagagcaggccgtggggcacttagaggcctggctggacgtgtctgcggaacagatacaacaagcactggaaagcattcgtctggggacagcttacgacatatggaaaatccccaaaggcgatagcggcttctttagggagataacctccccttgcgatgtgctgaagatgattcagagacgcatccttgatcggttactgtaccgaatcccgtccagcaatgcagcgcatggttttattccctccaggtctatcgtgaccaatgcatcctatcaccttaaaacagccggagcggtacttaatctggatatcaaggatgcatttccaagtattacatcgcagcgggtgaagcatttgtacgtgaggtatttgaagatgccgctacaacaccttggggtggctgtcccacatgccgtgttggactatgctatcgccttattggttgagctgaccacctacaacaaccaactcccgcagggcggtccctgttcaggatacctgctgaacctcgcctgtctgcgtctggacaaagagatttttcgactgctctccacatacggcgcctcttacaagtacacgcgctacgctgacgatattaccattagcgccccaatgccctttccagaggatctcagcagcaatctaatgaaagtcatcctgcacgccggatttcaggtcaataacaagaaagtccactatgctatccgggataagggacagcggttggaagtcacgggactcatcttggagaaaaataaggttaggatccccaacgaaaagctggagaagttcagaactattatctaccaagctagtctactcgacactgagaacctcacttgcgaaaaaagactggagatccagtctattatcgctttcgtgaagatggtttatgactcagtacctttccgcctctggaagccctaccagatatatctggacaagcataacatacctctgtcaaaaggtagtcagcacctgagccttgacttatatcctcattattga

SEQ ID NO: 14403 - RNA, 1290 nt, synthetic construct
  source 1..1290: mol_type = other RNA
atggccactaccgtcaattgccctgggtgcgccagggagatttcaatcggccgcgcttttactggagagaggcttgagtgccccgactgccagacgatactgctgctgaaagtgaccgctgctccgagtctggacagaccgcagacaatattaccgcctccgccacgcttcgctcatccacctgccccaaaagatgaggcggagatagatcgcctcgccagagctcatttagcaagctggcttgatctgtctgctcgcgaactgggcgctgccctgtctctcgtcgagaatggccagggctacgacacctggcagattcccaaggccggcccatccttcagaacaataagcgcgcccaaggaagaactgaaacgggtgcagcgtaggattctggatagaatcctgtataggattcccgtatcgaacgcctcccacggatttgttcctgggcgttccatcgttacaggcgcccgggtgcacctggaggatgcaaaggaggtgtataatttggacctgaaggatgcctttcccagcgtcgacgccacacgagtgaagcatgtgtttgttcggtgggccaaaatccccttgaaacaccttggtccacatgttgaacacgccgtggtcgaccgagtagttgaactcctggtaagattggtcacccacgagggcaaactaccccagggtgggcctacgtctggctgtcttctgaacttggcttgtctgaagctggacaagtacgtctacagattcctcgggcggtatcccggggatttgcggtttacaaggtacgcagacgacctgactgtaagctcacgcgacaccatccccgaggaggtgcgacagggtctacaggccgtgattcgggactgtgggttcagagtgaacccccagaagatcaggtatctgagtaaggctaggaatcaaaacctggaagtgaccggtcttatcctagaaaaaggccaagtgaggatcccacccgcaactctcgatcgttaccgcgctattctccaccaagccgcgactgcccatgagttacccgatgaaaagcgcctcgaggtgcaatccatcttagcgttcgtgaagatggtttaccccgcactcccaggggctattcggaaaccctttgaggcttacgcagccaaacacgtcggacggcctccaggacctcgaaaggcattcggactcgatctttatcgaggcgcaagaccacctgctcccgaaccagcagcgcctgaaccaggagccttgcctgccccagcaccagaacctcctgcaccgcctaccggatga

SEQ ID NO: 14404 - RNA, 1263 nt, synthetic construct
  source 1..1263: mol_type = other RNA
atggaacgctcaagtatggagtttgaaatccattgcccatcctgccagaaggagtacctcgtataccatccttttactggagccatcctcccgtgtcaaagctgtggaacaaacatcgtcctagccattccgaaggaattggagaaagaaggcgatctgaagcagttcaggtatacaatcaaacgaggaaggaagagagaaaagccacacacaccacaccttgtgtcacccgaaaaacagttgttactgagggaagaggcgctcttcgctctgagccggtggctggaccttgacaagagtaccctagaggaggccctggacctattaaaggaagggaagggctacaacgagttcagcattagcaaggggcccggccgtgggtacagaaaaatcagcgcaccctccccagtcctgaagaaagtgcagagacagatattggataggctgttataccgaattcctgtcagtaatgcttgtcatggcttcatgcctcggcggtcgatcgtgaccaacgccaagttccacctgccaaccgccaaggtagtgtacaatgtggacctgaaagatgcattcccttcagttagcagcctccgagtgaaacacctccttgttcggtacattaagattcctctcaaacacctgggtgagcaaattgaacatgagacgcttgatgagataatccatctccttgttcagtttttgacctaccagaacagtctcccgcaaggttctccagcttccggctatctgctgaatatcgcatgcataaagctggacaaatacctgtataaactccttcgggaggagggcctggcaaaggaaattaggtatacacgctacgctgacgatctgacattttcatcacaggactctatccctgagactttgcgcagaaagattatctccacaattcgtgactgcggattccaggccaatacctccaaaaccaagtatctggaccgtggaaaaaaccaagtcctcgaaatcactggcctgatattagagaagggtgcgattcgcatccccagagataccttggaaagatatcgggctactatccaccgcgcctaccttaccgatacttccgaactgacggaggagatgaaagtggaggtgcagtctatcgtcgcctttgttaagatggtgtatccattgctgccttacaggatatctaagccctataagatgttcattcagaaacacaacatcaatcccattgggagttcctctcagtttcccctgtctcactatcccaaagggtga

SEQ ID NO: 14405 - RNA, 1272 nt, synthetic construct
  source 1..1272: mol_type = other RNA
atgcgagcccagatccaatgtccgaattgctctcagaaacaccatatacaaaacccttacccagggtctttactcctgtgccctcattgtcagaccgcattattgctcgagttatcccctgagctggagaaggaatttcatctccacccaccaaaacaataccggttcactatacacagcggccgaaagaaacagcctctgacccccactattctccctccagaaacactccagcaactgcaggagaaagccttgttcgccctttcgcggtggctagatttgaacaaagagcatctgtccaatgtgctacagctgcttgagcaaaaccaggcttacgacgaattcaagattccaaagactcaaccccacacgttccgccagatttcagcacccaaagaagagctgaagctagtccagaggaggatactcgaccgcctcctgtacagaattcccacctcaaacgcctgtcacggattcacccagggacgcagtatcgtgacaaatgctaagtttcacttgcccaccgcctacgaaatttacaacttggatttgaaagacgcttttccaacagttaacacactgtgggtgaaacatctgctggtgcggtatctgaagattccgcttaaacatctgggcgagcacgtagaacatgaggtcctggatgagatcattctcattttaaccaagatgctgactcacaagaacgggttacctcaaggaagccccgccagcggctgcttgctgaacatcgcatgtatcaaaatggacaagtacctgtataaactgatagccgacaaatatcagaatacaataaggtattcccgttacgcagatgatctgacctttagttccccgactacgatcccacagagcttcagacaagaagtacagcagatcatcagaaattgcggcttttcaatcaacccttccaagatcaaatatctctctaagaagcggcagcagctgcttgaggtgaccggtcttattctggaaaagggccagatcaggattccgaagactaatcttgaaagataccgtgcgacaatccacaatgcgtacctgctccctcacgaggagctcactgagcagaaacgcctcgaagtgcatagcattgtcgcttttgtttctatggtttatagtcacctgcctaacaggatccagaagccatatcagaaattccttgaaaagcacggagggaaacccatcggtaagctgaccaagctagggtggaagacgtatcccccagaccctcccaatcccaagcttacatga

SEQ ID NO: 14406 - RNA, 2166 nt, synthetic construct
  source 1..2166: mol_type = other RNA
atggggcaggataccccaaagcgtaagagaaacaccgcgcatctcactataagggcgtaccaacctctggcctcctactctgacgcggctcatcagctcctggcccagtggctggatgtggacgtcgctttactgcgagaggtgcaccaggccatcagacaaggtgacgcctactatcactataggatccccaaacccggccggcttgagtggcgagacatctttgaaccttacggcgcccttaaggagattcagaggagaattctcgatagactgctgtaccctattcgggtgtctaatgccgcccacggagccgttccaagtagatctgtggtgaccaatgccatgcaccaccttccaaatgcgcaacagctactgatgatggacattcgcaacgcttttccttcggtcagactcccaagggtgcacgggatcttccgccgttacgtcaagcccctgtttcgcaagtttggccccctgccgaacgcaaaggacgcacaacagggaccctccccagtggatgaggctctccacttcctggccgcactgacgactatgaagcagacagtagatacaccacagggaccgagggaaacatatgctcttcctcaaggcgctccgacgagcggctacttgcttaacttggcatgtctggaaatggaccagaaaatcttcaagataatagaccagaacaaggacttaggcctgaggtatagcagatacattgacgatatcactatatccacccctagtgcgatcccacccgaggtccagaacgagctggaactcgctgttatcaagaatgactttcgacttcatcgcggaaaaactcgcctcgtggagacacataacgagaacgccgtcatttgcggagttaccctgagattcgggaggttagaagcagatcccctactgctcgagcgttgccaggaagttttggagaggtccgtcgaggtggctgatccacgaacagagattaaaaggcgctcaaagattcgcggtattgtctctttcttcaaacaggtgtatggggaccaattaccttctggcctgaaagacgtgtatcagcggtatcggaaggcccgggacttgcccgaggaaccagaagttgccgcaccgaccctcgcaccagcagaaccacgcacagctgaagcccaggatgccgtgagccttttagcccagtggctcgacctgtccccgagcttggtcggtctagctggtgagttggctagctctgggttgggttacgaggaatgggagatacctaaggggaacggcaaaacccggaagatctgctcccctaaaaacgagctaaaggaaacacaggaacggatactggatagactcctgtaccacatgcccgtctcagtggcatcccacggcttcgtacccgggaggtcaatagtaactaacgctcaagcccaccttgatgcacaacatctcatcaatctggaccttaaagacgccttcccaagcgtgagtaaacaccgagtgaagctggttatgcagatcgggctgggcaatcttctcaaaaagtttgggctgaggtgcccacggagtctgcgggatgatgttatcgaactcattgcttctctgaccacccacaaagatgagctaccccaaggcgccccgacgagtggatatctgctcaatctggcctgtttgacgctcgacaagcgcatctttgcctgtttgcaggagcataaggtgagcattgcatactcccgctacgccgatgacctaactttctcgacacaggaacctctgcctgacgagcttctgggacagatcaagaagttgattgagaatgccggttttagatggcatcctcataaagtccatgtggcatcagtggccaaagggcaggctctggagatctgtggcctgagattagatggcaatcagatccgtattccccgagagaaactgaaaacctaccggagcgtattgaggcgggcggccatcaaaatccccaccggacaactcgatgcagacacaaagaatcatgtccagggaattgtgggcttcgtgaaaatggtatatggagatctgccacactcacttgcgcagccttatcaggcatttctccagactcaccctgaagctcgtcccactggtagcgctagagaaaagttcgctttatatcccaacgttctgcccgcatga

SEQ ID NO: 14407 - RNA, 2154 nt, synthetic construct
  source 1..2154: mol_type = other RNA
atgtcagataactccacagtccggaaacgaaacacctcccacctcactatccgaaaacgttcaccgctgtcaagctattctgacagcgcctatagaattttgtcccagtggttggatgtcgacacctcactcctatatgaggtacttgaagctctcaaggccggcgaagcctattacacatacaagattcccaaacacggtacttacgagtggcgtgagattaatgatccttatggtggcctgaaagagatacaacgacggatattggataggcttctctatacagtccctgtgtcaaacgcagcacacggggctgttcaagcccggagtgtagtgacaaacgcactggagcatctgcctgacgcgaaagaggttctgtctttggatataaggaacgctttcccaagcgtgagattttctagagtacatcggatcttcaggaagtacattaagcccattctccgcaagcatggacccctgccctctcctaataccggaggcaaccctcccctggatgaagccatacacttgctggccgcactcactacgtacccccggagcatcaagcagaaagggcagactcagaaagtctggtgtttgccccagggcgcccccacatctggctatttgctgaacctagcatgtagggctctggaccgaaagattttcaaaattttcgacaagcacccgaatctaaatctccggtactccagatacctcgatgatatgacgatcagctcctctgttgagctgcccgcggacgttcagcgcgaattagagttagccgtgaagaagaatgactttcggcttaacagggataaaactaagaagtacggcccaaccgacacgccagtaatttgcggggtcatgctgaggcagggacacgttgaggcagaacctgagctgatccagagatgcaacgatcttctgaaaagatcagtccatgtggacgatccacgtgtcgaactgcaaaaccggaggaagattcggggaatcttgagtttcttcaagatggtgtacggggaccagatgcccaccgaaataagcgagccctatagcgagtaccgctcggcccggaatcttccgcctgaaccttccattccagcaccggcccatccaacagtcagcgcacgtgccgtggaacatcagtccgccatgtctctgctagctcaatggctggacatttctatggacaccctgaacaccgctcaccagaaatctcttagcgaggacggctacgaacactggtcaattgacaaaaagaacgggagtaagagacagatttgtagtccatgcctggaggttaaggatatccaggacaaactcctgtccagattactgtatcacatcccagtgtctgtggctgcccacggatttgtgccagggcgctcaatcgtgacaaatgccctggcgcacgcgaatgcccgctaccttctcaatctggatctgaaggatgcctttcctagcgtgtcccggaagagagtggaacattgtctcaatgtggggctaggaggtcttatcaagagattcggcctgcgctgccccactgcacttaggcaggatgttattggactgatcgcagacttcgtaacatacaaggacgccctccctcaaggcgctccaaccagtggctacctgctcaaccttgcctgtcatacccaggacaaacgaatctttgaactgttagaacgtacggctcccaatgtgacttatacccgctatgcggatgacctgacatttactagcacggagccgctccctgaaggtttcttggaggcaatacagaatgagatcaataggagcggattcaggtggcacccacaaaagacccactttgctgcagtccacaaaggtcaaaacatggagatctgcggcttgcgcctcgacgggagtacactaaggatcccccgaaaaaagctgaagcattatcgctccgtgttgcgcagagccaccaacaagctcgaaaccggtggattagataccgagacacggcataaaatccaaggcatcgtcgggtttgtgcagatggtgtatggggaattacctaggagtctgagtcagccatacgctgctttcctgcagaaacatcctgaggccagaccaactggctcggctcacgagaaaatctccttttaccccaatatacagacttga

SEQ ID NO: 14408 - RNA, 2160 nt, synthetic construct
  source 1..2160: mol_type = other RNA
atgtcagagacaaacacacccaggcctcggaatcggtcgcatctgaccatccaggctcgcagaccactcgccagttatagcgatgcagcctaccggctgcttgggcaatggctggatgtcgatactggccttctgcaggaggctctggaagcgatcctcgccggtcaggcctatgagagtttcaggatcccaaagccaggaagggacgaatggcgcgtcatcttggacccttatggaggacttaaagaagtgcaacggcgaattctagaccgtcttttgtaccctattcccgttagtaacgctgcgcatggtgccgtgccagggagatccgtggtcacaaatgcacggcaacatctaccagatgcccaggagatccttagtatagacctgagacacgcattcccctctgtgcgattttccagagtgcactctatcttccgcaagcaggttaggccgctgctgcgaaagttagggccgcttccaaccgcccacagcggtacattggacccagtagacgaggtcattcacctgttggcaggactgacaacctacaagcagaccgtgcgacagcagggtagaactacccaggtgtactgcctgccccagggtgcacctacctctggttacctgcttaacctggcttgccttcccctcgatggcaagatctataagatcatcgagaagaaccccgagctgaacttgcggtattcgcgctacctggatgacctggtggtgagttcccccaatcagctgaacgacgaagtgcagaaggaggtcgagctcgccgtcgtcaagagcgattttcacttaaaccaccagaaaatagctcgcactcaagcacctgcccccctcgtcgtttgtggggtgcagctgagcggcgaacagctcaccgctgagggaggattgattgagcggtgtgccgacatgctccgtaatgccgaggctgtcagaaaccctactgccgagcagaaattgagacggaagataaggggagtaatggtgttctttagacaagtgtacgggcaggatttaccgcctaatatagccgagccttaccaacagtacagaacaaaccgacagctacctgaagagcccgaaactgtagctcaggccgtggccccggttacattggcgacggaaccctctaatgcagtggagctgctcgcccagtggctggatcttaccccagaaacgattgcggaggctagggccaagattcaagccggcgaaggctacgagtcttggtccattgataagggcaatggctccaagcgcattattacatctccagttgaccaactgaaggacatccagactcgaatcttatcacagctgatataccacattcctgtttcaaatgcctgccatggctttgtacctggccggtccatagttacaaatgcaatgacgcatcagggcgcaaccagcctcattaacctggatcttaaagatgctttcccatctgtaagcaaacatcgcgtcgaactgggactgcgcattgggttggggcgagtgatcaaaaaatttggccttcggtttcccaggccaatgcgcgatgaactgatagcattgctcggggaactgctgaccgtggacgaccagctgcctcaaggcgctccaacatccggttacctactgaatattgccgccatgtcactggataaaaggttattcgaactcatccaggagcatgatcaggaagtgacttataccagatatgcagacgacctaacttttacatgcaaggacggagagctcactacggatttcctcaacaaattgaaacgtgtcatccgccgctcaggattccggtggaatccacgcaagacccacagggcagaggtggataagggccagcagattgagatctgtgggatctacgtggacgatgacgggttaagactgcccagggacaaaatgaaggcttaccggagcatcctacgtcgggcggctacccaaattcccaccggccagctcgatgacgctactaaacgtcaaatccaaggggttgtgggatttgtggaaatggtatatggcgaactgccaagaagaatcagcgagccctatcaggcgtatctccagcagcaccccgacgctaggcccaaaaggctctacagggacaaaatttccttctatccgaacatcatgcctaacccttga

SEQ ID NO: 14409 - RNA, 1038 nt, synthetic construct
  source 1..1038: mol_type = other RNA
atggaactcaatagacccgccgacaccgctttcgcaatgctggcccggctgttgtcaacagacaacgaggtggtgcgcgcgggacatgaagctctcagtgggggagatgcctaccgcagttgggaggtcccaaaagggaacgggaagacgcgcagaattgatgcccccgtggaagaattgaaacaggttcagagcttgctcctgactcgcctcttctgccacgcacctacatctccatttgcccatggcttcgttcccggcaggtccatcgcaacaaacgccgccgttcaccagcagactgggagatcactggtgtctcttgacctggaggacgcttacccatccgtatcgcgacagcgggtcgtaaaaaccttagagtggggcctgggctacttcctgaagcacgtcgctccttgttcaagtcgggagagcagagacgaattgtatgaactgattgcagacctctgttgttttcggcaatgtttgccccaaggggcgcctaccagcggactgttacttaacatggcgtgctgctccctagatagaaggtgtgctcgactgctaagaaggtgccgagatcagtttccagaactccgttataccaggtacgccgatgacctcagctttacctccagcgaggagttatcccacgagttcctggagcaggccataggctgcgtagtccaagcaggatttcgggtgaatcggagaaaggtcaagaggtattcggtgcgcaatgccgacctcgttatctgcggaatcaggctgcatgagggccaactgactctgccgcgccgagtgcttagaaggtatcgtgccctacttttccagtctctggcttacggccctgatgaaataagcgaagagaataggcagtttctgcttggtcatatcggcttcctgacaatggcttcttccgtgtgtccgcctcagcttgagcggctgctcgaggaagtgttacagcagcacggatcatggctgcgcagtggtgtggcatctcacattttgccctcttacggtgaggtggggcgtagctga

SEQ ID NO: 14410 - RNA, 1035 nt, synthetic construct
  source 1..1035: mol_type = other RNA
atgggcatgaatgcctatgccgacagcactttgtctctcctgagccgactgctcatgacagacagggagactgttaatagtggctttgaggctctctctggagttgcctatgattcttggacagtgccgaaaggaaacgggagggaaagacagattgatgcccccgtccctgaattaaaaagactgcagtcactactgctcaagaggctgctgaacttcgcgcccatatccccgttcgcccatggattcgtgcggggcaggtccattgtcacaaacgccgctgtacatcgcgagactgcacggtgtatggttagccttgatcttaaagacgcatacccctcggtgtccagggatagggtggtgaaagcactgcaatggggagtgggatcattcctcaagcatacatccccagaaaccacccggggcgaacgtgaggctgtgtttgaggccgtggctgacgtatgcactcatcgagacgctcttccacagggcgcccctacgtcaggccagctactgaacatgacctgctgcagtttagatcgacactgttctcgcctgatgagagcaagccgggaagagtttccagggttgcgctattcaagatacgcggacgatttggcctttacagccaccggtgaattgagccacgagtttctggaaagagccatcggttgcgtcctgcgagcggggttcgaggtgaatcggcgcaaggtgaagcgctacactgtagctaatgccgacctggtgatctgtggaattcgtttgcacgacggtcagctcactctaccacgccgtgtgcttcggaagtatagggccctgctctttcagaccctggcaagagaacctgaggatatgagtgacggggctcggcaacacgtccatggggctatcgggtttctgaccatggcaacaaccgtctgtcctccccagctcgaggatctgcttcaggctgtcctgcaacagcacggcacctggttaagacctggcacggttcccgcacacttcccattctacagctccttcagtcaaaagtga

SEQ ID NO: 14411 - RNA, 2934 nt, synthetic construct
  source 1..2934: mol_type = other RNA
atgacggaacctactcagcgggccgctaggctcgcacgtctgatgagccgcggtgctgccaccggtgctagtgaagcccgggcaacaccccacgaagctgcaaggagggccactcaggtactgatcggggcattgctgccgggcgacgtcgaattgcaagccgccctggggggtgatttgtctgccctggagcatgcacaaagacccggcccagcgcaagccttgctggatgctctcctggatgctctggagggcccattatcggcccctctggcaggctgggtggaacttgctgagggaggggcgtctgacggtgccttatggcgggctgtggacacccatcttgccagacccgagtgtctggctctccggagggccttaacctctaggtgggccgctttaccctcaacacgcgcccgtctcagtgctctgatcgatgccaggccatctctgagaggtgcacgaggccccctgaccggattgttgtccgccgctctgtccgcctcagagagtctgcggggttcaagactctccgaggccctccgggttgaggtttacgtttcttacagaagattccagcgagcactcctgtcagacgatttgcgatctgcaggagctgcgctggatgacctgttcgggtacactcccaatcgcccggccctgttaatcagcgatgccgccctctgtgtcctcgagggtagacctggggaggctcgtcgagcactgtccgaagcgctcgctttcatccacgaccatgccgccttggaagccgcctacgctgctttagcagcaccccccaggttggagaagaccgcagctgcccctcgccatagtcctagggatctgcggcctcgattaggcatcgaggggagggcagtgagagcagaagggcgggtgtataagcctcgcttagacagatggagcccccggccgtcctatgcaagatgggtcatcgaggccgtggcggcagctttaggaagggctcctgaggccattgacgccgctctgaccaccctccacagaggagaggcctaccgagcattcacaatcacagcaccctctggcaagcctcgaaggatccaggcgcctcaaggcgctctcatcgagattcaggcggccatactcgagggcctgctgtatcgcctacccgtcagcaatgccgcgcacggagccactcctggtaggtcactgattactcaggccgtggcccatctgcctcagcctcgacaggccctgtccctggacctgaaagacgcctatccatcggttagctttcagagggtctatcgcgttttttacgaggggctcgcacgcctccttccagtagcacgcctgccaggactcgaaggccttcgccctctcgtggcgagagatcacctcgcgcacttgctggccactctcacctgtgcaccccttcaaggcgccaggcccaaacccaaaacagcttgggcactgccacagggtgctccgacttctgcagccttgctgaatctagcatgcgctgacctggaccgaggcgtgtacaagctgttgcgagcccacccaggggtggacctgaggtacacacgctatattgacgatctgaccattacagctacaggaggcgctcttccggaaggcctgacccgtcaactggagcgcctgattgagagagtgggattttcctcccagccgctcaagcggagggcatggagagtaggcgaagggcccctaatcatttgcggacttagcctagagtccggcggggtcgcttttggacctgacttaatcgcccgggctgccacgttatcagcgcttggcgctccaggagccgcggaattacgcggactagccgcttttgcccgacagatttatgcccagacgccccctttcttgcagagttgggcagaagccgccccggcaagagcatggagtagtccgcgggccccttacttgcgttacctgcagggcgatcccactgcagcagctcctggcgtcgcccaactggctagatggctcgacgcccccatggctcaagtggaacgggcccttgcgctcttggaagctggtgccgcctacgccacgtggagactgtctaaaggcgggggcggagagcgcgaaatcgaatccccagctgccccacttaagggcctgcagacccgcatcctgcataggctgataagccgcgcacccttgtccgcagctgcacatggctttgccgagggaagaagcatcgcgacaaacgccagagcccacctaggggctgcagcacttctgaacgttgacatagaggatgctttcccttctgtgagcgcccagagagtgagacatgccctcgatagggccctaggcccacggttagcatcactggggcccagcgctgaagctgctagtgaggccctgggtctgctgacacgcctgctcacctataggggtcggcttccacagggggctccaacctcaggcgcgctattcaacctatgtctcactccacttgatcggctactcgaggatgcctgcggaccccgaggcattacttacacccgttatgccgatgaccttacgttcagtagcccacgcgtggaggcgatagatgcggccttcggggaccagattaaacagatcattcaccgggccggctttaggtggtctgcccgtaaatgggcacggatggcggcgccaagactcgaagtgtgcggggtacgcctggacggagctcatctgcgtctgagcagagcacagctgcaacggtaccgggctacccttcaccgtcttgcccacgcccctacactggacgccgaaggaagggataaggcagctgggattttggggtttgtccacatgatatatggagagctgccagctccccttaggggacccgctcaagcattgaggcagcggcaccgccttgagccaaagccaaaaagcaagctcgacctctatggtcgggggtga

SEQ ID NO: 14412 - RNA, 1059 nt, synthetic construct
  source 1..1059: mol_type = other RNA
atgcccggcaggtctgctactaccctgctggcaaagcttattgacttaccggcaagggaagtggaggaagcattggccctggtgacaggcggcgaggcatatgataggtttgagatacccaaggtcggcactagggccccacgcgttatccaggcacctgtggagcgcctcaagcgggtccagagagctcttatcggtttgctggaacccctggctctgcatagcgctgtgcacgggtttcgccgtggccgaagtattgtcaccggggcagagaaacatttgcaggcgagggccattctgaacattgacctcaaggacttctttcattccgtcgatcgggatcgggtgaggcgtgcgttacagcgctcactcctgccacgcttggttgaagaaacaggcgaactgacaaaagcagaaggtgatgccgtcgtggccctggtgaccgaactcacgacatatgctgtccctggaagagacttacccgtgctgcctcaaggagccccgacctctcccttcctagcaaatctcgccgctcggaaactggatcaggagattagcgagctccttgccggactaccgggagaactggtatacacgagatacgccgacgacttgacaatctcggccccacacgaaatcgacagaaggcttataggggaaatcataaagcgagtgcagagggcaggttttgctgccaaccctcaaaaggttagactggccagtaccctgaaaggtagcccacattaccgccagaagctcgaggtaaccgggttagtaatcgatcctcgagacaaagttctccgcatcccccgggatcgcctggagttgtaccggctgaagattcaccaagccgcccaccttcgtgagctcgacccaggaactagacaggagatcgaggggttcgtgtccttcgcctttatggtgtatcggaccctgcccccttccctggctactgcatacgagcgattcacagctgcgcacagactagcgccactccaagctggcaagtcacggcgagccgctagaagaagggccactcagaaagagctttatccttga

SEQ ID NO: 14413 - RNA, 1056 nt, synthetic construct
  source 1..1056: mol_type = other RNA
atgtgtgacccgtgcggccttgacccccaaggttcctggccaccagtggcaatagagactcccaccgtgctgtctgccgattgcaagatggcgttggccgacttactccagttgcctagcgggcagattatctcggcatgggacgcagtgaggggaaacgctgcctacgactggcacttgtttggggccagagaagttgctgtgccagtccctctgctggccgatgtccagagacgcgtgctcgatagggtgcttcggacaggccctgtgtctcctgcagcttatgctggagtgccaggacgaagctacgttgccgccgcctggaggcatttaggcggcacaggcgctgaaaccgtcgtgatggatatagccggcgcttttgggagtacgacctacggtcacgtgcggagcgccctgtctagacggctcaagcacgaactgtgggtacttggtctggactccgatgatgctaaagcagtcgtccaggtgattgcccatcttgtgacagtcgatatggatggtcgatccagacaactgcctctcggggcacctacctctgtcgccttgtttaatttagtactcctgtcactggacggtgacctcgcgaggtggtgcgttccacgcggaatccgctatacacgctatgttgacgatatggtcttcagttgttccgagggagtacccaatcagctggaagagtttgtggagcataacgtcgagaggttccgtttccggttgaatcagaacaaaaccgtgcgcagtgctgcagggatgggcactgttcacggcctggtgcggactgctgacggaatcgtaccgggggagggcgctagaaggcgatttgcagacaatatccagtggcacacgagacaggccgaagacgaggccacttcagaggcgcatagggagaagtcaagagggttcctgaaaggcctgaacaccttccttcgtcaattctacgaacggcaggatctagcacgccccgaaatgctcaagattcacgttcccgaaggaagcacagccgcgagccccctagtggatctgctgtgggagtga

SEQ ID NO: 14414 - RNA, 906 nt, synthetic construct
  source 1..906: mol_type = other RNA
atgtggcgctggtggttgagactggccccagcagggcgttcggaagtcgctgttcccgtgcctgtgctttcagatctgcagcgccagatcctcgagcggattctgcggacaggacccgtcagccctgctgcatatgccggagtgccaggcagaagctatgtagctgcggcttggaggcacttgggaggttccggtgccgagacagccgtgctcgacatcgccgatgcgttccctgccaccacatatgggcacgtccgcgccgctctgtttagaaggctgaagtccgaactctgggtgctgggactggaccccgcggattctaaagtacttgtgcaggttctgtctcacttggtgaccgttgacaaggggggccggtctaggcagttaccccttggctccccaactagtgtggcaatgttcaacctggtgttactccctctggatggcgaattggccaggtggtgcaagcctggtaaaataacctacactcggtacgtcgatgatatggtgtttagccaggccgacggactaccagtaggcttagagacgaccgtgcatcgggccgtggtcagacacggcttcagactcaatcctgcaaagactgtgcgacgccctgctggccaaggaactgtccatggcctagttcgcgtagccgcagggattgtgcccagcgaaagggcccgagagagatttgcaagtaacatccgttggcattccgacagaaccgccgacacgacaatcccggctccccaaaggcagaggagtcgaggttttctgaaagggatggacacctacctgcagcaattctacgagcgccaggagatttcacggccagggtcactggagatccagataccagaaggcgctgcagttccgccacccgctgtcgatcttctctgggactga

SEQ ID NO: 14415 - RNA, 1014 nt, synthetic construct
  source 1..1014: mol_type = other RNA
atgacggtcatcaccattcctgatcctcttagtgatgattgccgggtcgccctgagtgatttgctgaggctgccagttgagcaagtgatggctgcctggaaagttagccaaaccgaccggggttacgattggaatctgtatggggaccgtgttatccacgtgccccagcccttgctcagcgaggtgcaacggcagattttggatagggtgctgcgaaccggccctatcagcccagcagcctttagtggagtgtctgggcgctcctacgttctcgccgcgacacgacatctatcgggccctccagctgagacagctgcattagacatcgcagacgcgtttggatcaacgacttatgggcacgtccggggtgccttgtggaagcgactcaaacaggagctgtggatactgggtctgtccggctcagagtcaaccgccattgtaaaggtactgagccatctcgccaccgtggccgacagagcaaggactcggagactgcctttaggatctccctcctctgtggctatgttcaacctcattttactaccccttgatggcgaaatgctgcgctggtgtagcgagtatgggataacttatacaagatacgtggacgacatggtattttcatgcccggacgggttgccacccgatcttgaaagccgggtggaggccgtggtccgcagacataggtaccgtctgaatcacggcaaaacaattagacacgctgcaggctctgcccgcgtgcatggacttgagcgcactacagaaggcgtggtccccggagctgacgcagtggaacggttcgccgctagagctagatggcaccagggaaaggcagtcgatgaaacctcctcccgctctcagcgagagaggagttacggtttcctcagagggctggacgtgttcctgaggcagttttacgaggcgcaggatctccagaggccagactcccttaggatcgtcgtaccggaaggcgccgaacgtcccgttcctccaatcgacctgctatggaactga

SEQ ID NO: 14416 - RNA, 999 nt, synthetic construct
  source 1..999: mol_type = other RNA
atgaaaatgctgcctccagagtgggagcagttgtgggaatgcactaggtcggggaatgaagtcacggacgaggtcaccttccacgctcttgagtggctgtatgataacaggacaaaaaagggaacctggttccacaacccattccgcgtggaaaagaagaataagcaaggccagttccgccttatctcctgggccggcccacaactctctattgttcacttagcaattagtcggtggcttaagcatgagtatgtgagaaagagcatggatgctagcacacccggagcaggaggcgtgatggtggccttgagagcccatggagataataagtttgtaacactggtggacgttgctaacgcgttctcctccgtgtcagagcgaagcttgtctgccgccctgcgatgcctaatggatgatgtcaccgaggaattcctggatgtgctactcgagctcacgaccgtagacggccatgtctggcagggttggtccgtgagtaaagacctcttcaacctcgtgatgttaaatctggatcctgtagtctttgaccagctcccctttcttggggtcgagatctatacacgttacgtggataaccttatattctcatctagcaaaccgtacagccctattactctggagcggtttttgaggcacgtgttcaagcagtgtgggttcttgctgggcccatttcagcattccgaccagggaagatattcatatctgggtgtgatggtagaagaaggtaactaccgtccccaggacgttaaacgctacgttgtcgagatagaaaaggccctgcaacacccgtgtcctcacttatactattggactattctcgggtacttttcatggaccctgagcgtgtctagggacaatatccccaaagaactgtttgaggtgttcgaacggtactttaaactggttggcatgatccctcccgcactacagagactgatgatcatgcggtaccagatgagttttgctgacctgcaaaattga

SEQ ID NO: 14417 - RNA, 1038 nt, synthetic construct
  source 1..1038: mol_type = other RNA
atgacagaaaagaagtacaaactccagccactggaaaaggtcagtcttgatgtgcagttttcctggaccatgggcattatcgccaagttactcaaaataaccaagaagaatctcagaaaggccaagaaaatcgtctcggccccaaagtacgacgatgaaattctgataaatggcatgcctacccagatcacattccactatggattctacgggttcatcaagaaaatcaagcgcaaacagcgcaaaattctggcaccccacccgaagctgcagatcgtgtttcgggcaatcaaagacacattagtcgaaatggaacccactcacgagaacgcctttggattcgttaagaaacggaacgtccagatggccgtgagatccctccttggtaacgctcattttatctcatttgacattgcggacgctttcccgagcattactgctaagatggtggagaactctttgaagaagctgaaactacaggaggagctgatacaacccttgactcatctggtcacctgcgattacgatcaagagaggaggctgccacaggggtctagctgttctccagcaatcctcaacctcgtgtacaagcccatgtgccaggaaatcgatcgggtttgtggtacacataatatatcatggttcgtatatgccgacgatttcaattttgctgctctagtgattccccctcaggcgaaaaatgaacttcttgccattccacccaaatatggctttagcacgaaagcatccaagacaaaggacaacttggggaaaactatccctcacatgttgggcctgacgattgtggacgagaaggttcacatacggaggcgcactaagaaaaagttcagacgaatcctgtacatggcgtggaaatatgaggcctacagccctcaacagattagaggggtagctgtggccattcgtcaaacctatggaaatgagaagaactggcctggttggctgaaagagtactggatcaaatatcaaaccaagaggcaggcagaaggcggacgatatgagaaaagtgcccagtga

SEQ ID NO: 14418 - RNA, 1035 nt, synthetic construct
  source 1..1035: mol_type = other RNA
atggtaagggagaaacatgaactacagccaatgaagaatgtgtcactggacgtgcagttctcttggaccatgggcattatggctaaattcctgaagactactaagaaggaacttcggaaagtcaagaagatcattgacgtgaaaaacctcaaagatcagatccctatcaaaggctcgtttgttaagatgacatttacacatggattctactcctttaccaagaaaattaagcggaaacagcgaaagattctggcccctcatcccaaagtgcagatcgtactgaaggccatcaaagatacgctggtggagctctctccagcccacgaaaatgcattcggctttgtcaaaaagcgagatatccagatggccacgaggtctttgctcggcaacacacactttattagctttgacattactgatgcgtttccctccatcacagctaagatggtggaaaaagctttacgtaagctgaaaatcggggaggaacttataaagccgctgatatggttgaccacatattattataaccaggatagacggttaccacaggggagtagctgcagtcccgcccttctaaatctggtctatgttcctatgtgccaggagatcgacgaggtgtgtaaagcacatggtattaagtggtgcgtgtatgttgacgatttccacttcgccgctctcaagatagttcccgacgtcaagaaaaaactcttgaccatcccgtccaaatacggattcagcataaaggccaagaaaattaaggacaacttcgacaggaccattccacacatcctgggtctgactatagtcaatgggaagattcatatcagacgctgtacaaagaaaaagttccggaggatcttttacatggcatggaagcacggagcgtactcacctcaacaggtggaaggaaccgtggcagctatcagacaaacctacggtaaggagaagaactggcccgggtggctgcgcgagtattggaccaaataccaaactaaataccaaactgagggaggccgcaatgggaagcacggctga

SEQ ID NO: 14419 - RNA, 999 nt, synthetic construct
  source 1..999: mol_type = other RNA
atggccattagtaatgagatgtgtcccctgagcgtggcctcgattcaggtgcagctgcagtggactctcgggggactgagcgagctgatttcagtccccaagaaacaattgaagaaagcattcaagatcgtgtcaacacctaagctcgaagcaaccatcatgaagagaggggggctggtacgaaaaacttttctttacggctttgccagctacataatcaagaataagaacaaggaacggaaaattctcgagccccacccagaggtccagaaggtttacaagaagataaaggaatggctggagaaagtggacccgcctcacgaacgcacattcggatttgtcaaggaccgcaactgtaaaaaagcaaccgagacattgtctgccttgttcaggggtggccaccacgtcgcattcgacatagccgatgcttttccgaatattaccgaagaaatgatcaaagaggcgctgctgcggcttgaaatagaggttgatatggctgaggtgctggcctggtttgtgacctacaactatcagggcaaacgtagactgccccagggctccagtagctctccttccattttaaacctcgtctataaaccaatgtgcaaggagatcgacaggttttgccaagctaacggcatcgaatggtccgtgtatgttgatgatttcaacttcgcggctccttctattagttcagagctgaaagacgccttactcagcatcccctcccaatttggattctctattaagcctaagaagaataaggacaatctaggcaaaacgatcccacatcttctcgggttgacagtggctgatggaaaactgcatttctcacggactcagaagaagaaattcaggggtatcttttatcttgccgtgaagtaccaggagtatccacctgaagtggtacatggtattatgagatacgttcaccatatctacggacccaaagagaattggccaggctggctaatcaaaatggggggtacccagtcctga

SEQ ID NO: 14420 - RNA, 924 nt, synthetic construct
  source 1..924: mol_type = other RNA
atgcttgagaacaagtctggttatcgggtctggtctattccaaagaaatcaggagggaaacgccagatccaggctgccctttggcccctgagagaaatccaggcgaggattgccgctctgatatacccctatagcatatccgagattaatcatggattcatccctggcaggagccaccagacagcagtattgccgcacttgctggccaacgctatgttttgttgggacattaaagacgcgttcagttctacaaccaagaaacaagtgctgctgaaattcagggtcattggatttaacaaccctctcgccgacctgatggccgacctggtgtgctactccgcaacgggtaagtcagaggatgggtttttaccacagggctactgttccagtcctattatatttaacctcgtgctgaaggacatcgatcggctgctattcctgtttgcccagcagcgcgattaccagattagtcgatatgtggataactttgctatttcgaccccaaagaaggaaatccctcgacaagatcgcgaattggtggtgcgcatagtcatgaatctcagcaatggctcatacaaagttccggaagaaaagacttcctacttcaaggtggaggaggacaaagtatgcttcgaattcctcgggctcgttatcaaaggcccaaaaaagggcaaacgtgagattcgggtcactgacgagaagcttgctgattatagatggaccatccatgacgccttagagaaaggtgactttagcgatagaaaggtcagagagatcagggggaagatcaattacctgaagagcgtgtatcagcgtcagtccttgcctctccccatccggatcatggaactatatttccagtaccaacaaatggcagaggttgcaaagacaggacagctgcccctgaatctttctggcccctga

SEQ ID NO: 14421 - RNA, 918 nt, synthetic construct
  source 1..918: mol_type = other RNA
atgctcgagacaaaaaaagcataccacgtgtggttcatcccaaagaaaccggccggaaagcggcaaatccaagcagctagatggccccttaacgaaatccaggtccgaatcgccggtaagatttacccctatagcattagcgagatatcccacagttttgttccaggtcgctctcatcgtaccgccgtgtttccgcatctgagagccaacgctttcttcaccttcgatattaaagacgcttttcccagcacgcgcaagaagcaggtagccgctaatttcagatggatcggatttaaaaaggccgtggcggacctgatggccgacctgatttgctactcacctactgaaaaatcagaggacggcttcctccctcaggggtatgcctcctctccaaccgtttttaacctgatcttaaacacaactgacagggtattgtttgggttctcccagaagagagggtatcaggtgacgcgctatgtggataattttgctattagtgcgacccagaaaacaatccctgaggaggagcggaagctagcgatcaagattgtcaaatctcttagtctgggaaatttcaagattccagaggaaaagacatcctatcgggaggcaggcgaaaaggaagtccacttcgagtttctgggcttggtgatagaaggtcctagggatggagagcgtaaaattggcgttgctgatgaaaagctggcagactaccggtgggtcatccaggaagcactggataaagaagattttagcgagggcaaattcagggaaataagggggaagatcaattacctcaaatcgatctaccagggccgcgccttacccaaccaagtggccgagttgtataaccagtacagactgcttcgagagatcataaatactaccaagagggggcaactctcactgcccatttga

SEQ ID NO: 14422 - RNA, 1017 nt, synthetic construct
  source 1..1017: mol_type = other RNA
atgatcaccccgggtagaaaagaagccatttctgagctggcagtggctttggagatcagtcctaatctcatcaatcgggccctccaaatgattacagacaagaccgcatacaatgtgtggagcaccccaaagaaatccggcggggaacgccaaattcaggcggcaaattggcccttgaacgagatccagtccaagattgccgccgagatatacccatatagtgtctcagagattaaccacgctttcgtcgctggaaggagccaccgaacagcagtgctgcctcaccttagagctaatgcctttttctcattcgatatcaaggacgccttcccgtctgttagccgaagacaggtcctcctcaagctgaggctgctctcggttcagctgggcctaaaggacagagtggctgagcttattactgatctggtgtgctattctcccactgggaaatctgaacatggcttcctgccacagggctatcgcagcagtccacatattttcaaccttgtcctcaaggacatcgaccggatattagccggatttgctcaaaaaaggggctatcagataaccagattcgtcgatgattttctaataagtacgacagagaaagccatcccccgcgaggatcgaaggctggtgattaaactggtagaaaacctggggggattcaagatctcccctgagaagatatcctacctggagagcgaaggaaacgacgttcattttgagtttcttgggttggctatcaagggtcccagggaaggagaacggactatgggtgtggcggaaaagaaattgaacgaatgtcgttggatcatcttaggcgcaatggagcagaaggatttttccaagaaaacctttcgtcggattaaagggaaggtgaactacattaagggcatttacaaaagccagggtaaacccctgcctgcgaagatcgccgatgtatttgcccagtaccgctcattacgggctatcgcagacgccgacaagaatcaacaggtgctgttcaaaatctga

SEQ ID NO: 14423 - RNA, 987 nt, synthetic construct
  source 1..987: mol_type = other RNA
atgaacaatgaaaaactcaagaagggcataaacgagatttgcaacttcctggagtacaaccctggcatcatggatctggagaaagcattcgagggacgcaatagttaccaacgcatttttatccgtaaacgcggagggaaaaagaagggaaagcgggtcattcacgtgcctccccccaagctcaagaatgttcagtcagttatccaccggcgagtgttagagatggtggaatggccagcttctgtgcatggcttcgtgaagaatcggtcccacttgactgccgctctgaaacatagcaggtccatcccaccccccgtggctcttttactgattgactttaaggacgcgttcagcaacgtcggcgtgaaaaaagtagaaagagctctggataagaggcttcagcctaatctgctttgtcccctgagtccaggggccatcaagctgcttgccaagctgatcacctacagagggcgactgccgcaaggagccccatcatctccgacaatttttaacctagttgcactcgatttggacgaggttctgagcgtttacgccgaggaaagaggctatacctatacgaggtatgtcgacaatatagccgtgtcctcacctaagcctattcccaaaaacgaaagagcggagatcatcggcctgtgccgacagtttggatttcaggtggtgagtgaaaaagcccgctaccaggaagcaaagtggggtgtactcgagatgaccaaagtcctgctgcagccctatggtggtcaaaaatggtatgccagctacgggctaggcttgtctaataggaagttcgtggataaggtcagggctatggtgcatagagcacagaaagacccatcaatctccttggcaagcatttgggggaaaatagattacgtccgtttagtagacccatataagttgagttcgcggctctccaagcctatgagacagctccggtctatacagagcaacctcgagcgcaggaaatga

SEQ ID NO: 14424 - RNA, 981 nt, synthetic construct
  source 1..981: mol_type = other RNA
atgctgacgcccttgggatgccggttccaagagctggtgtcccgcgctgctcagttgctggcagtggagccggctttgatcgagcaggctctccaggaaaaggggcagtaccagcgacggacacgcaagaagcccggtaaggatgccgagggtaggccgagaatccgagtgttgcacgtgcctcctccagtcgtcaaagaggtgcaaagggctatacacagacatctgcttaatctgggtaacagctggtttaggaaactcggcagtgatttcgcttggcctatcgccatgcatggctttctcccaaggaggtcgaaccttacagcagctcgtgatcacatcgggaacacagccctgttcacactggacttcgctgacgcatttccctctgttaggcgggaacgcgtggccactgccttacggtggcatgcgaagttaggacggcaggaagcaaattttattgcgcgccttgccacgtatcggggcagactctgtcagggctcacccagctcaccactgctgttcaacctcgtagttcttaatctactcaaatctctggagcggttggccgcagaaagggggtaccgtgtgactatctactgcgacgaggtagccattaccgcagataaacccatacctgccgaggaaagacgggcgatcctgcagctggtcattcaggccgggtttgcagtgcatccaaaaaaaatccgctatcaagaagcccgctggggcgccttagaggttactaaggtgctcgtccgtccagacagacttggcctcagtactagacacaccattgatagggtcagagcattcatagatcacctggcccgaagaggaaccgctgacaccaaggaattggccaaggctaagggatatattgggtgggttgaactggtggaccctgagaaactaaagacccgcctgcgaaagtccctggcccaactagcgaaactggagcagtccggcggacacagctga

SEQ ID NO: 14425 - RNA, 1017 nt, synthetic construct
  source 1..1017: mol_type = other RNA
atgcagcaggctgagctgccactgtcacccaacaatgccccctggccggacgattttaggacagcccttggcttggacgaagccgcgcttgcagaggcatggatgcatcgagccgactaccggcctcatcgtgtccctaagcgcaaggcgcgaaggattggacccaagcgggagcctcgggtggcaaagaaaaagagacgcccgattgatgaaccacacccggctctccgggtcgttcaagaggccatccgcaggaaactactcgagcagatcccactgtccgcatgcgctcatggctttagaaaaggtcgctctgctaaaactgcgctcttgccccaccgcaagtccacgagcttcttcactgtagacttccgcaacgcattccataaggttaccggtgcaatgcttgctgaagccctgagagcctgcacacccattattaagcccaggtgggtggcgcctttggtcgccttcacaacgcaccgaggccggttaccccaaggtgctcctacctcgaacgatctattcaatatcgcatgtcgagaacttgacgccaacctggctgcctttgcccagactagggggtttgtctatacaagatacgcagacgccgttattattagtgccaaagcacctctgccaaccgatctccagcgggaaatcgaggccaagatccgtgcttacggctttccactggccgctgagaaaactggctataccgaaccaaggtacgctcacccagtcatcatgggaatcgcggtggtggatggccggttaagagtgcccaggaggcagctcgatcgtgctagagcttttctgcatcgcgccaaactggaccctaccataccgatggagattgtggagggggtgctggggaatgtgcgaggacttataggggggctgccccccagactgctgaaaccttataaggccctcttgatgtctagacacttatgggtgaggtacagacggcggcgcggaatcccatatgtagcacacagccctatgcagccatga

SEQ ID NO: 14426 - RNA, 990 nt, synthetic construct
  source 1..990: mol_type = other RNA
atgccagcaccttggccagatgatttcagaaccgctctgggtcttgacgaagccgcactggctgatgcttggctccacagggccgactaccaaccacaccgcgtacccaaaaggaagccccggcggatcggaccaaaaagacagcctaaagccatcaagaagaaacggcggcccattgatgaaccacaccccgccttgagagtggtgcaggaggccatcagaaagaagctgttaaaacgtattccgctgagcagtgcagctcacgggttccgaaaaggccggagcgccacaactgcactgattcctcaccgcaagtcagcagccttttttacagtggactttcgaaatgccttccacaaggtcaccactgcaatgctggccgacgctcttagagagtgcgcccctatcatcaagcctgattgggtgccgcccctggttgctttcaccactcataggggccggctacctcagggagcacccacttcaaacggcctgtttaacatagcgtgtcgcgggctcgacgccaatctggctgccttcgcacagacccgcggatttgcgtatacaaggtacgcagacgccgttatcatatccgcgaaggtgcccctcccaacatctttacaaagggagatcgaggcgaaaattcgcacccatggattccccctggccgcggaaaagactggctatacggagcctcgttacgctcatccggtgattatggggatagccgtagtcgccgggaggttgagagtgcctcggcgacagctggatagagctcgagcctttttgcatcgagcaaggtacgaccccgctattcccatgaaagtggtcgagggggtcctaggcaacgttcgcggtctgttgggtggcttaccacagagactccttaagccatatcgggaactccttaccagtagaaatctgtgggtccatccacgtaggcgcaggctcgctcctcctcttacgccgagcacatcttcccccccatga

SEQ ID NO: 14427 - RNA, 1224 nt, synthetic construct
  source 1..1224: mol_type = other RNA
atgagggataaacgccaactggggatcttcattcccggcttcttagatgactccatgttgaagttggcagtcccacagacagcgcggatgatcggctacgaggagaagcatttgcccttcttcagcagaaccctacgacgtgtgctgagcgaccctaatgcctatcggagtgtgcagatcccaaagaggctcggtggctatcgaactctggatataccaaatcatgatctcatgcaagttcaacggcgtatccactcctgcattcttgtcaggcgctatgtcccctcccccatctgccactccttcgtggggaaactatacgatcggtctggagctgccgaggagaggtggcaagccggacgatcaatattcaccaacgcatttgctcatcttgcaccaggaccacgcgccaggagggacgtaagaataccatcgtctattttaactgtagatctgaaagaggcttacccttccatcgctgcagaccgcgtgtttcgcgtgtatcaggaactgactggcgatccttggactgcacagattttgacacacctctcagtgtggagaggctgtcttccacagggggcccctaccagtcccatgttgcagaacctggtgtaccgcgagctggacgtcgccttggcaacggaatttaacaagggtccgtttagactgacccggtatgccgacgactttacactgacgtctctcagggggtatatcgaccctaagatcgtaatccaccttatcgaagtggttgaggctcacggattccctgttaacagacagaaagtgctccggtggagacgaaaagatcgtcgcctgagagttacaggaattaatattaggcgcaccgccgagcggccgttcagtttacccaggaagaagctggagcagctcagagctgcgcttttctacgccgtgaagaccctgcagagcactgcgcggtacgaggctgaaagaagggccgcaggtacactggacaccacgacagccaaggctctcgaccaacttcagaaacagacctggggccgtattcatggcctggtcggctttgccgtccaggtttacggggatgaactgcccccgaccatttacaaatggtttggcttcctacgcgaagaaactgaagtcacaggtgaggaactcctgcagcagataagagagagctttcctgtgtctgaggtgcagcgaagcggacgggaactgctcggggactcaccctga

SEQ ID NO: 14428 - RNA, 1101 nt, synthetic construct
  source 1..1101: mol_type = other RNA
atgcagcagagactgagcgacccttactgttacagggcaaagcaaattcccaaacgcctgggtggcctccggacaattgacgtgccatgcccaagactcaagaaactgcagaggaggatccacgatttcttgctgagacgtcattaccggccttcccgcatctgccactcctttgtggggaagttttacgatgtcgcccggcccgctcgcaaaaggtggattcccggcagatcactctttaccaatgcttgggttcacctcggagtgccgcccggtgtttctccacgcagcaaaagcagacgaatacactggagaataccgaggtctttgttctccgtagacctaaaagatgcttatccttcaataggagtggatcacgtgttccgtatttatcaggagcttaccggcgacccttggacagctcagatcctgtctaccctgagtacttggaacgggagcctgcctcaaggcgctccaaccagccctttgcttctcaactttgcatgtagggaattagacggcgctcttgcccatgaatttactcgggggccctatcgcctgacacgatatgtggacgacttcgtattgacgtcgacagaccctgagatttcagaagctactcgcgagagattcgtggcaattatcgagcagcacggattcaagattaatcaagcaaagacctgctattggagggataccgatcgagccctccgggtgacaggaatcaacctttttccccaggaacggcatatcgggctgccaaatgtcgtccaacggcagttccgcgcagccctgtactacgcactgaagtcactggagtctatccatgcctatgccctgcagagaggcgttttagacgagacaaccgccatgtccctaaggggagcggagaagcaggcctggggtctgatctacggggttattggcttcacctatcaagtctacggtgctaaaataccgcgtccaatatacgcctggatcccagagttaactgcgcgaactggggtcacttccgatacgctcgtggccaagatcaagaaataccctcccattgcggccatccagcagattggagaagaaatcatcggcagtagtccctga

SEQ ID NO: 14429 - RNA, 1149 nt, synthetic construct
  source 1..1149: mol_type = other RNA
atgaaagagttcgaaaacatagggtcaattctcaaggccatcgtgcaaaaatctatgtacaatgtgattggactgtctaacgccattgatctcgaaagagctctggaactggctcgggacccaaagaccgggtataggcgatttattatggagaagaaaagtggcggcaaaagacctattgatgctccgcacgatgacctcaagttcgtccaaaggatgatctataagaagatcctcttgaaggattttactccatcgaaaatatgccactctaccctggagcgttcaatcgtttccaacgcctatgcccatttaggtgtcccagccgatgttgtgcctaatccatcctacatcaccatcccgtggagagagccccagtccatacatttgatcgatctccagggtgcttttccaagcattaagaccgggcggatcaaggaaatttaccaggatattctgcacgatgagaacgccgcagagattcttactgagcttagtcaactgcggggaagccttcctcagggagcacctacttcccccctgttgtttaatttggcctgcagagaacttgaccgcgatctagaagaggaatttgcagacccaagactccctcttacacgttatgtggacgacatctcagtaacttccttggactcacgcgtgccccagaagaaacaaaaaatgctgcgcatgatcgtggaaaaacatgggtttaagatcaaggaggagaaggttgccaactgggatgtgagggacaagcctctgaacgtcaccggaattgcgttaaaccccgcaaaacgggcgatcttcctaccctacaaaacaagagagatatttaggctcttaatgttcaagagctataagacgctgtgtgaggctaatagcgagtggtttgagcaggagcgagacatcagcctgatgaagttcattacgcaggggaggcgccggtacaaacgagccttcggaaccatctgtggcgtggcgtctctggcattcatggtatatggtaaagacgaagcccccaaacgcacattcagttggttcgaaggctacgatggtgacgtcagcagtgctacattccaggcaatcctggacgacataaggaatggcgacctggtcggcgaaatttggggctacaatcagttttga

SEQ ID NO: 14430 - RNA, 1215 nt, synthetic construct
  source 1..1215: mol_type = other RNA
atggcaaagaatcccgaatccattggctcgctgttagctaacctgtcagctaaggagccgagggggagtctcctgaccaatctgctggcaaagatcagtctgcacgaaacagccaagttaatcgggaccgacgagagatccctcttgagagctctgagactggccaaacggcccgacggctacaagcgaaagtacattcccaagaagaggggcgggttcagacctgtcgacgcaccacatgacgacttaaaatgggtgcaacggtgcctgcaccgcaacttcctcagacgccgccaccatccgtcatccatatgccatagcttcgttggaaaatgttatgatcctcaagcggagttcggggagaaatggagagcggggcgcagcatcgtttcaggtgcctatgagcatatttgtcctggcgaatggaggcatccaaggtcactgttcagcgtggacatgaaggatgcctttccaagtgtgacagagaaaagggtgagcgctatctataaagagctgtccgggaatgagctcgtggcaaaggtactcactaacctgagcgtgctcaacaactctctgcctcagggagccccaacttcccccacactgtttaatctagcttgcagggagttggatgcaaacctcgccgaggagtttggtttagatggtcgttttgtgattactcggtatgccgacgacgtgacgatcaccagtgtagagcgggaaatcaaaaccgccgaccgagaacgacttgtgaaagtggtcgagggccacggattcaaggttaatcgagaaaaggattgttactggcaggactggagacacgtcctgcgcgtcaccggcataaatttggaccctgagaagcggcgtcttttcctgcccaggtctgaactcgatcgtctgcgcctgttggcgtttcacagccttcgggtgcttgagaatgaatctgccgcttggcttgaaagtaagtccagattcgacgtcccagacttcctccggtcccttgacaaaagggctacaatggccttcggacgcttgggcggcattgttggattttgctctatggtatacgatgagcaggagtggccatcacggctcttcggatggcaccccgctctagccgaatggtctaaagatgattttcacacgctgttgcagataatcaaagaaggtgaactagcaaaccctgattctgatctgtttgattttagcccctga

SEQ ID NO: 14431 - RNA, 1266 nt, synthetic construct
  source 1..1266: mol_type = other RNA
atgaacattaaaaagctgaggaaggaagacacaaatctgcagcagccatctttgggaatccagagcctcgtcgagaagaccttaggaaagctggcactcgaggagactgctaggttaattggggtggatgtttcggacttggtcaaggcactcgagatagctaaatcatctgacggctaccggcacaaaaagatcctgaaaaagcgcggaaaaggctataggcggatcgacgtacctcataaagatttaaaatgggtccaacgggcgtgccacattaatctcttgcttcgccactttaaacctactcccatctgccattccttcgtgggacggagattcgaaaaggactctcttcactggatttttggcaggtctgtcatcagcggagcctgggctcatctaggcgttcccccagacgaagaaccagaccccaagagcaattcaatcaattggagaaagccccgaagccagctggccatcgactttaaggatgcctttcccagtgtgtcccgcacacgtataaaggagatcctgcagaagctgctcgagcagacgggtaaatatcaggcaggtgcagacattatcgctgagatacttgttgacctcaccacctggaatggcgtcctcccacaaggggcccctacatcccctgtgctcttcaacctggcctgtcgagatctagatgaaattctgatcggggaattctctgatgaggagcaaaagagtcgcatcaagatcacaaggttctgcgatgatatatccgtgacgcgactgtcaaagaaaattggcctgaaaacccgaggtaaaattgagaggttgattcataagaacggcttccagatcaacgaagaaaaaactgtgcactggcaggactcccaccatgtgttgcgcattaactcaatcaatctggatcctatcaaccggcgtgtgttcctgccgcgggagactattgagagattccgctacctgctttatagatcttggcaggaacttgaagagtcattcagttggtggctggtgcttgggcgtgactccgataacaccataaagtattttctgaaccaagccgcgtatgggagaattgccgggatcgtaggttactgtagaatgatctacaaggaggatagcgaaatgccactcagactattttcctggaatccggacttgagcggctactgggaccaggagaggttcgagcaaatctttgctgatataagcaaaggaagtctgattcaggatctggaagaccacttacactacttttga

SEQ ID NO: 14432 - RNA, 1212 nt, synthetic construct
  source 1..1212: mol_type = other RNA
atgcttcatcaggctatcggccatgtggccgacctcattggtttgcgcaagagggacgtaccgttcctgaagactgtttatgaacgggctctgaaagacccctacgcgtatgaacccatccttattcgaaaaaaacgtgggggctacaggcgtatcgatatacctaacaaaggactcaaatacgtgcagcggtgcatccaccaccaactcctggtcaggcgatacgagcccacccacatttgtcactcacatattcggaagacctatgacgtagctcaggagtatggagacaggtggttaccaggccggaccatcgtgagcaatgctttcgcccaccttggcgtccctcctgacgtcgatcctcacgaccaatacgatgacgaaaggataagatggcgcacaccatgctccctgtttgccatcgatctaaaagatgcctacccttctgttagcgaggacatggtgttcgacgtgtatggcgagttggctggtgacccgtggagtgccgagatactcacacgcctgtccgtgtggcatggctgtttaccccagggcgccccaacgagtccattgctgctgaactttgtccttcgagacttggacgcggcaatcaaaaaggagtttcgcccacagcacttctgtgtgactagatacgtggatgacgtagttctcacctcaaggcacaagaggatttcgttacggatccagaagcggcttattgacctggtggaagcatatgggttcaaggtgaacctggaaaagaactgttactggcaagctgatcggcatgtgctgagagttacatctgtcaatctatatcccgaagaacgcagagtggcactcagcaaaaccgttgtcgagcagtttcgctcactgctgtatgggttgtttacaggactaagggcgaatggatttctcctgcactccaatctcgtggcagacgccttctcccgagctctggattgcgaggatcctagagtagccgagatccatggcatgagatctaaacagtttcacaagatgatggggatcattggattctgccatcttgtgtatgggaacgagctgcccaagcgtctgagtgcatggggggacagaggtggtggagatgcaatggatgttgaatgggccatcgagatgattaaggatgggtacttcgatactgatgtgatagatgcctcttacgacgccagcggctaccgcgtcagatga

SEQ ID NO: 14433 - RNA, 1167 nt, synthetic construct
  source 1..1167: mol_type = other RNA
atgagaaaggaggtgcgtcagatgtttcccaagagaatcggagccatcgtcccaggtgtaatgagggaagccgttctcccatacttagcccaacagctcgctatcaaggcagatatgctacgtgaagcgcttgaaatccgcgcacggcctatggtgcagggtgacctggagtctccctacaggcggtaccccaagaaaaagaagaccggaggcgttcgatggatcacagcaccacatgaaaccctgaaaaaggtccaggctgctatctataagcgcctgctccgcccacgctacaaaccaacaccaattgctcacgggtttattagaggacgggggatcgtaacgaacgccgctgtgcacatccaagggggcagagaacctcagagtgcattgaatattgatctccaggatgcctttccttctgtccgggcagagagagtggttaaactgttccgtaagctgaccggctccgaggagctggccttgactctgggatatctgactacttggaagaatgaacagggacagggcgcgattcctcaaggggctcccagcagccctattctgctaaactcagtgctgcaggagttcgacgccgagctccttgagctggcagggaagttcgggttggtggtgactaggtatgttgacgacatcacattgagcggacccgacgcccgaataccggataaagtctttacttatgtggctaggctggccaaaaagcacggtttcctccccaatatgaccaaattgcggtggcaacatgccaaccggaaccctattgaaataacaggcctccacctgataaaaccttgggtaggtgacttagaagtgaggcttccagctgctacacggcgcagatggaggggcatcctacacaacctggcagaggtgcccaccgacgcctttggcaagcctgaggtgggccttggggtgggaatcattggcgtcgccagacatgtccaggccgtcagttccaatgccgcgacccgaggccatattctgccgtacgaacttagagctccggcatgcgagttggccctcctggatagggttccctcaattgagacgttaagggaccccagagcgtggcgcaaattccagcagaaacaccaggagtcgatacgacggttcgaactggcctacgcagatcgccaatcctga

SEQ ID NO: 14434 - RNA, 1122 nt, synthetic construct
  source 1..1122: mol_type = other RNA
atggaaacggtggtgccttacgtcgagcagctggagttcgacttccccggagttcctagacgcggaccaggacgcgtgtttgtggtaccagataatattaagcagaagatagagtgcgctagagattttttggtgggacgtctcagattgccttaccaggagatggccttcgctctgaccctgcccaatgcatgctggtatgagattactaagaaggtaggcgacaaacagcgcaccttctatgtatctagacggccattagctgagatgcagcgccgcatcgccacgtatctagaagattcttccaaatgggagcgatggtcgatgagaaaaaggggcagccttcatcggagcgagacagatttagcctccgctttccggcgaggcacaagcatcatcacaaatgcctggccccaccgggttaaccggagttcactgaccctggacctccgcgatgcttttgagtcaattaccagaagacacgtggaaaggtatttaacccgaatctttgctaacaacatcactcaccccgtccaaagccccgaagtgactgcctgggttcttagtcggcttgttacatgccgcggtaaactgcggcaaggccccccatcctctcctgcagtcttcaattgtatgctggaaaggctcgacgacgcgctggcagaagctaccggtgcaccgaaaagggacgtgatcatgcccgccatgtacttgggcatgagattccagcgttaccgggagctggatgcatctgataggaggtcaggggcgagttacgtcgcacctcgaggggtcctgtatacaaggtacgccgacgatctttgttttagccacccggacgagacatttccaatagccctggaggagatgatcagaaaggtggtggcttcccatggcttccgtattaatggggccaagactaggcatggacgatacgggatactggaatttccgggggtcgtggtcgcaaacggccatctcaggcctaagacccggctagtgcaagaaattctcgagggagtttcaattatgactgcccaggaacgcgccgggtatcgtgcgttcctgcaccagttcggcccatccggtagactcgaatgtttgagggtgtttgacaactga

SEQ ID NO: 14435 - RNA, 1053 nt, synthetic construct
  source 1..1053: mol_type = other RNA
atggacacatcgaggggcatcgccgcaagagggcacgtagatgcatgcctcgcaggcctgaagatgtactccctagatccagatgttgtgcttgacgtccttctgcggcccaacgctcattggcagcgcgtcgtgaaggagaaacggggcaaacagagggtatgttactctccttccgatgacctgagaacgcttcaatggcgtctgatcaggattctggaccgcagcatcaagttccatcggggttattgccgaatctgggaccagcgttatgccttcaccatctctaagccccggttcccacagaccggatggtggaaagggtcttcaattgtcgccaacgctagggttcacaggcacagtaatagtgccttggtgtgtgacctgcggcacgccttccagagcatcaccacaaggcacatacaatcttttcttaacagaacccagccctttagaattcgaagaagaagggacgcttcctggacttacttccctgaatccttaatgtgggtggcctcacggctgttgacatactacgggaggctccgctatggagctccggcaagcccgattatgttcaattttatgatagaccgactggctgtagacctggccactgctgttaacgctcccctccatgtgaatgaggcggccctccgctccacgcaacgaattctcatgaccgtgtatggagacgatatttgttttagttgcaagagaggcgccgttccagagagcgtgctctggagaacagagacactggtgcgccaacatgggtttcgtatgaaccacgccaaaacactccgctcagggaatggagcgttactgttacctggagtggtcataagcgcacacgaagtgcgcccccgcgatacctacttggatccattggccaccgcaatccagggcggcgaacttactcaggatcaggctaacgggcatctaggtttcctgaagccttttaagaggccaggtcgacgggcgttgaaacggtggggtcctactctgtatgcccagctgcaggaaagagcaggcgtcactatcaatgagtga

SEQ ID NO: 14436 - RNA, 1005 nt, synthetic construct
  source 1..1005: mol_type = other RNA
atgttcgtggaatccattatttggagtatggccgaaaacactaccccaagctttgataaagagctagtgagatatcggaataccatctcaaggttggttagtttagctgagcgggagaggtacctcaagccattctatgtcaagaaaaagagcggaggcaaacgacgcatagtgcccgctactaaggacctggtgtacgttcaaagcatacttgcatcttggttcgtcaaaacatttggtggcagcgctgattactgctatacgggcaaggggatcatccctgctatcaagccacatcagggtgccaaaacagcattggtggttgatctgaaagacgcatttgaccacgtcacaaaggagaagatttacaagctcctggagcgccggtttcgtaagatgtccaaagaagtcagacttctcatagcaaccctcctgacctacgagggcaccactcctcaaggatgtgttagtaccccttacgtatttaacgctgtggtggaccccatggacaaagacctgctggccatcctgggaaactttccactgagggcgtatacccgttacgcagataacatgtgcttctcgttcgataaaccggtaaatctgtgggccgtcgacagagccgttgccaagattatctcaatgcatgattttcaggtgtcttggtcagccggatttgaacatatgcccatctcctatcttggcactcacgtgtacgaagacagactggaactcgaccccgataaactggacgcctatgtgctcctcttaaatgaggctttgtccagccctacacccgaggtgtaccgcaaacagattctggggattctgacctgggtgtctcaggtgtataagacgactaacccagaaaagttgtccccggaagatagggcgaagctagcctatttcatcggtcttttccagcagtacttcgggaaggtacgcgggacacctgagttactggagcggcttgtcacatcattccacaattctcgaatgttctga

SEQ ID NO: 14437 - RNA, 1233 nt, synthetic construct
  source 1..1233: mol_type = other RNA
atgacgaagattctgcagagtgcctgtaacccactgcagaccaaaggtgggctggccgctgcatactatctgcggaattttctgggctacaaggacagcgagcacaaaattaacttcctagagctccttaggagggccatttatcggaactctaacctctacagcactgccaggatcccgaagagaaacggcaagtacagaatacttaatatcccgtgccatgaactaaagatcgtccagcgcctgatcaacaagaccatcttgcagaaaactcgcgtcttaaaatgcacgtttgggttctacggagggagtggccttgaagccctgaaaaaagtggttaaacctgagcaggccattttttcagtagatatagtggacgccttttccaatacaaccgctcgggctgtgtatcacgtattccgacgactgaaattcgggcatttcgcctcttactatttgacctgtctcacaacctggctccatcccacaagatcgttctcacagactaaacgtcagagcgatcacgattttgcgcatgataggtccgacgagttgcacgcattcttatcattcgggggattcaattttgccggtaaggaagctaaattgcagcaaaatagctttgtgctgcctcagggagcgcctactagccccagattatttgacctgtgtttttggcagctggactacaatctggtcgtgagggcaatccacgttaagggatattacgtcagattcgctgacaatctctactttagtgcccccgagttctggcgggatggacagatagatattaccaagaacaacaagggcgctctactctttcactccccactgatttcatccatctatgatattatgcgagctggttatcggatatggattgaaccctttcaaaatatgccacgctacacccaaaagtggtaccagatctataagctccataaggccaggcttctgatgccagacgataaagactgcctgcctgctctcggctataacgttttccctgatggcacaataagaaataagcgtcgcttcgtgttgcgcatcaggatgtctgtgttcaacctgagaaaggcgctcgaatccggcaattatgaggacacatggcggatttaccagaaattgcagggtcaaatgcaattcgcaatccacgaccagctgccaccccgccttttaaagcaggcaactgacctgctttctcagatcaacagccagcaagcaatctga

SEQ ID NO: 14438 - RNA, 1131 nt, synthetic construct
  source 1..1131: mol_type = other RNA
atgttgaagtcccgcactcatattaagaacccactgcttaaaatcagcgggaggaaggccgcttggtacctgttttcgactctcgactacccttttgacgacttcgaacgttttcgtaaaatcctatgggctgccatcgtgcggagcccatggttatactctaatatcgcaataccaaaacgtgacggaagcaagcggattcttgcaattcctcaccccgatttaatgaccatccagagagccatcaacaagaacttcctcgaactgtatcgacatcctaacgtctatggtttctccggaggcaacgctcgggaagctctgacagcgttggcccggtctaaccaggccatatttgcctctgatatcaaagacgcatttccctccactaccggaagagcggtcttcaatttctttaggacagaaaagttcggctactatactagctattacctgacctgcctcaccacctggtttaatcaacagaaaaagttcaaccttccccaagtaggtctgccgcagggggcacctactagtcccagactctttgacctgtgtttcatcaggtttgaccggagattcgcccggttgacaaagaatgccaatggggtgtacttccgctatgcagataatatcttcctgaccgccgaggagttttggccagagaggattaacattcagacgatgagggatggcggggtacgctggcaaagcccgatcattagtgctatctaccgaatacttaagagagggtacgagtttgaacattctcccgacaatgagatttggcacaatcaggagtatggcctgcacaagtcatactttgcaaggcagggacaaattcttcatgccctcggactaaacattaaagacgatcagttacacaacacacgagagttcaaactgagagtgcgcatgaccatcttcaatctgaagaaggctctcgaacaaaaggatgattttgagacgaaaatctggcctttgtatcacaagctggatggcatgcagaaattcttggtgaaagagacatcatccaagctgtgggaggaggctgaacaggccctgttccaggttgcgctcatacgctacagtggtcagggcggccgctacgttaaaaacatttcagaatattga

SEQ ID NO: 14439 - RNA, 1254 nt, synthetic construct
  source 1..1254: mol_type = other RNA
atggctcatcagccaatttacaaccccctgggtaacccctggggtaaagcagctgctcactggttgcattggcagctggcccttgaagaggacgatattccttgggatatgtttgcaagcatcctttggcttgctatcgagcgggacccaggactttattatcgcaaacgcaagcagaagaagtcaggaggaacacgcactctgtgcgtgcccaacggagatttgaagaggattcaaaccaaaatcgatcagatagtgctcgccgctgaaccgagactgccttatgtgtatggctttggggggggctcagtggcccaagcattgcagccgcacctggagagggggtaccccatctttaccgccgacatcagggacgcattccccaatacgcatgacatggctgtctacaatgtgtttcggcgactaggctaccggaaaaacacagcctacctgctcacccgactctgtacgtggcctatcaatagccagtggcgagccgctctgccacaaggtgcacctagttcgcccaggctattcgatctatgctgtcgccccctggatgtgaaactgcaccagctcgctgcaaatgttgacgggtcctataccaggtatgctgataatctgttcttctctgcgagaagcttcagtgcccgccagtaccggccagacgaaaagaagagatacagaggttctgcctggccagaacctcagccgctgtggcagacagctccaggcgacgatgcggcagttatttcatggcacgccaccctcatttctgccatatatagacgctgcaccgacggctatgagttacctgaactccctcgtaaagtgtaccgtcaccactggtcctggctgagaaagtgttggatccacgtaaacccatctaacactatttccgatcggcttgagtaccagttacataagacatacctctggcatccaaaacagggacacgcgttcaaggcgctgggcttgcagataatcgacggacggctctgcaatagcaggaggtacaagcagagactgcggctgctgactcaccacgtcagctggctcctcgatcatcatcgtgattttgagactgaggtcgaccctgtttatctgcaacttaatgggctgctgcagtttgcagtaagagagacattgcccgcccctttgttaactgccgccgcagccttatgtcaacgcgtggaagacatcaggtattccggccccagtcacacccgagtccggcatattaacgcctactga

SEQ ID NO: 14440 - RNA, 1167 nt, synthetic construct
  source 1..1167: mol_type = other RNA
atgaacgacaaaaaatccccgctcgagagacaaagtggccagatagccgcaaagtatctgttcaagaagttgaaataccccttcaaggactggcagaaattctgggatcttattcggctggctgtcgagcgagacaaaaatttatataggcagatctccctttctaaaagggggggcggcaaacgcgttatactcatcccttgtgaggagctgaagtacctccagcgcctgatttcccagagacttctggcagacatctcaggtcatcccaacgcctccgggttcagtgagggtagcatccgcgaggcccttctgccaattgtgcgggccaagcaacccattttctgcgcggacgtaaaggatgcctttcctgagactacattcggtgctgtgttcagcgctttccagcgatgtaagtatggatacaacagcagctacttcctgacatatctaacaacatggaggacgtaccagtcactcttttataattctgcccttccacagggggcaccaacctctcctagattgtttgatttgtgctttgaacccattgacaatgcgctggccaagtttgccgccaagatcgggggagtttacacccgttatgctgacaacatcttttttaccgcgcctaccttctggcctgctcggaaaagttgcagaaaagtggaaggggaaaccatcgtcaaagataaacatggatttgaaacgtactacccttacaagcgtaagataagcaccatccccgaaggaaaggctgatatcgacaaaagtgattcgggcgctttaaactggcactcaccagtgatttctgcaatttaccagattgtgcacactaagggcaaaggaacttactatcagctacacaaatcctacctatgtgacaagggccaactgttgcacgccctgggcctgaatctgatcaacggccagctccataatacaagggaatttaagaggcacctccggctgaccatttttaacctgcaaaagagcctgtccgcacaggacgatttcggtaataaaatctggccgttatatcagaagctgaatgggatgatgcagttcgccatcaaggagactttgccagtgtctctggtccaacagtgggaagagctcgatctcgcaatatatcaaattcgctatcccagaacaatcggaacttga

SEQ ID NO: 14441 - RNA, 1101 nt, synthetic construct
  source 1..1101: mol_type = other RNA
atgtgggaaaataagcagaccgggtctattcggcacgagtactacgaaccggaggagaatgtcgccgccttagtatggcttagtaaggagctggggtacaaaattgtcggcgaggatgtgatttactctctattggtccagctcagggtggacaagcctgagcagaaccccctgtaccacaccattctcaaaagaaagaatgacggaactatcagaaagctatatagccccctcgatgaattaaaagaggtgcagtaccggatcaagaggcgcatcctgagctcctaccaggtgtcagacaacgccttcggatactccgggggaagtgtctttgacactcttcagccgcacctgcctacagacggtgagcaaagaattatgttccaggccgatatcaagaacgctttcccatccgtatctggcgaaaatgtgtttcttgctctctatggtctgccttcgagcgaatcttatgaacattatcgcgagaagggctacctgtcctggcatgttgccgctatgctgacggagttgctgaccatttatgatggatggagcggtttcctgccacaaggtgctccaacatcccctaaactgttcgacctcgtgtttctcggcattgacagaaacctttcccacttggcatgcaacgttggcggcgtttacacacgtttcgcggacaacatatacttttctatgaaaggggagtttttccccgaggtcatctcccgtgccataatccgaacaatccaagagtgtcgcagtcgagacgattatctgttcgatgcacggagattttattgcaaaaaggtaaaggtgaggcccctgaacgttgaatcattgagggcattgggcctcaacattataaacggggaaatccacaatacccgcgagtttaaactttcaatccggaagagcatacaccatatcaattggctcctggcaaattcagatacccccgagtatagcgccaaactggaacatgccatcaatgtgctaaaaggacagatgtcattcgcggtggaggaaacccttccagaagctctgctgcaggactattacagcttaagtactactctggatgggtctgtgagtacgatttga

SEQ ID NO: 14442 - RNA, 1116 nt, synthetic construct
  source 1..1116: mol_type = other RNA
atggtgagccgcatatttagcccatgccccgacatcgtttcggataacgaaataccagccattatctggctgagtaagaccttagggaaaccccaggacgatgggtccgtcctggaaattttaaaacgaatccggcagggcgagacactgtatgaggaggggttcgttctgaagaggaatggcaagttgcgcaaaattcttaaaccagtcccggaactcaaaaagatccaacgcgagattaacaggagagtactgtccgacctaatcgtgcaccctaatgtctctggattctctggcggtcagctgcacgatgccattcggcctcatctgaacgcaaagagcattttctgtaccgacatcaaggatgcctttccctcagtgacatacaatgacgtctttcgatgcctcactaagggacgagaatacgagttgacttatgatattagcgattcttactacgtgtatgacgaagaatgggacgacttctttccctgtattataggcagaaaacgtttcaagatactgaaccatggatttctgtcatggtacgctgctcagattgttaccgaaatcgctacagccaaggacgcgtacggaagactgagactggcacagggattccctacgtcccctcgcctctttgatgcccagatggaaccaatcgatatcaaactcactcatcttgcacaaaatgtcgaaggggtgtataccaggttcgctgacaatattcacttctcaatgcaagaggaggagtttcccggggaggtggcacgtgccatactcaagactattgagggaaggggtaggaacctatggagtaacaaatacgagtgccacaaaacacggagtttcaaaaccgatggccaggctgtgaggatcttaggcttgaacatcattgatggcaagatacataatacgagagcgtttaagcgggccgtgagactgtccatccaccacgttaagtggttccttgagcgcggtatcatcgacaccgaggagtttgaacatgcctatcggaagctgaatggccagatggggtttgcagtgccggagacattccctgtaaaactccttgacgattacagccagatcaaaaagacttataaggacttgtga

SEQ ID NO: 14443 - RNA, 1227 nt, synthetic construct
  source 1..1227: mol_type = other RNA
atgggtatttacaaagaaatcgtgaaagaccttgtaattgattacaaaaagcgaaatccggactggacagaatatgattttagcgagcacctggtcctccttacgtaccgggccgggaacaatgctgtcctgcccgatcctttggcagacagcgaggaggcctggcaagcaacactgaacagtgaggtccctgtgaaaaacgatcctgtcgagacttttctctcttccttcaggctaaatcaagacggagatgagcggattatcaaaatcgttgagcggtcaacattttactggctgggtaaaatcttccgcatgcacttcctggaccttatgaatctggttgagaaaatccgcgttaagggctggtccaacttttatagactggagtggcaggataaaaaggggggaggcttccgccagttgcagatccctaaccgacaattgatgggaattcagactaagatcaatgaaaagctcctccgggatttacccaggtacccccaggccttctgtttctctggggggagggtgatcgatgcccttaggccacatttgaagttcggctctcttctgaaactggacattaaaaaggcttttccctcaataaccgcttatgacgtgcgcagaggactgacctttggccgtaagatcaagcccgtcgaaaagctccagaacattgaagactacggtcacttctcctggtatctagctaaaattatctgcgacctgtgcgtgacaagctccttgccacagggcgctccaacgagcgggaggttgttcgatctcgcattttaccctcttgacgtggaactctccaaacttctgaaggcggcgggaggaaattatactcgattcgcagacaacctcttcttttcagtatctgaacggttcttcccaagtgagctgaagaacagcattaagatcatcataaccggcgagaagaggaactttctaaagctgagataccacaagctctggataaccaataaaagatatgtggccctgcgcgccctcggcctgaatactctgaatgggcgtctgcggaacaccaaggcctttaagagtcgtttacgcaaagccatgcatcataaacagagactgtcggaattgggcctagacaccgaggccgctcagcaaaagataggcgggttaatgggttttgcagtgaaggaaactttaccgaacaagctgctgaagaagacagagcagattaaaaaagatagatga

SEQ ID NO: 14444 - RNA, 1089 nt, synthetic construct
  source 1..1089: mol_type = other RNA
atggacagaatcccctggagtgagagcgacatcgaattcgccttaagcctcggaagggacacagaagagagggaggccaacattgaacagtacacgtccgaatggatgaacgagaggactgagaggattcgtgggcgggaaaccgcagcttttctttggttggcagctaggattggcatgaaacctaaccgcttcctgttcgccgtcgcagggtttcggtcaggctcatttggctatacaacacacttcgtgactaagagagacggaaaaggcaagcgcaaaattaccgccccccacaaggtactcaaggcagtccagcgtaaaatcgcccaggagctgttctgggatcacccaagatcccctcattcttttggcttcctgggcggaagctcagccgaagccctgcttccacatgcgaaaaatgctagcctgctgatggtggatgttacaaatgcgttcccgtccatcgagcgggacgtcatattccggtggttccgcaagcgcgattatagttggagagtgtctggtattttagccgatttggctacctttgagggaagactcactcaagggtcccctctctctccgcggatcttcgaactgatgtttgaatggatagacgagaggctgagcagactggctaggagggttggggggacgtacactcgctatgcggataatgtgttttttagtatccccggtgcacacatggataaaaagctcgtgtggaccgtgcttaagaaaatttggcggatggaccttatctgccaagtccctcgggacaagagataccacccaaccttcgatacccacaagctcagggtacgaactctaccaggcaatgctgttcatacactcggactggtcttgcgggacggggaggtgcacaacacccgagattttaaacgcactctacgtaagagaatccatcatgtgagatatctgctggagaactcgcgcgagacaggcgttattttgtccgcctggacaatgttgtgtggaacgtactcttacgcccgaaaagaaaccctgccccccaagctgatacaggaggtggaagagcttcgaggtcgaatccaccagttatga

SEQ ID NO: 14445 - RNA, 1098 nt, synthetic construct
  source 1..1098: mol_type = other RNA
atgattaataaccaagagttcgggtatgatccggagttcatgcttgcttttgtgcgcgaattggaggagaaacgcatagagcggggagatcagctgaggtttgaactggaggaggagaagcggtacattcgtaaaaaacagctgtacgctctgctctggttggcgcgccggatcgaagtgaaacccgagaagatcattgagctcttcctcgccatccaggagaagaaaaagatccacaatgtgtactttaagaacaaatcaggcggcggtaagcgaaaaatcatcgctcctataaaggagctgaaatatctacagaagcgcatttctacagaaatactgaagagatactccagagggtcagaaagctgctcctttgggtttatcggcggatccaccgcccaagccttacaaccccacctggaaagcggttgtctcttaatgttcgacattcgcgacgccttccccagcgtaaagcaccggcatattctggatctgtttagggggctagggttttcttggtacgtcgcttcgttcttagcagatgttgccacttatgaaggttgtctggctcagggaagcccaatgagtccaagaatcttcgaactcatctgcgcaaactatatcgaccggcctcttgagaaaatcgccagaaagaacgaagggatttatacacggtacgccgacaatatttttttttcagtgctgggcgatggcttcgacgaaagattgaaacgagagatcttccgtaatatctgtcctccacgtagttccaaccttaaatctccatactgccctaagtttcagactcacgaattcagggttaagaaactcgcgggcaacgccatacatgcgctgggactggtgattcacgatgaaaatgtccacaacaagagggagttcaagcgaaggtttcgcaaagctatccatcatgcaaagtggtgcctgaagaacaattatgacctgttgcccgaagcctggggaaaactcagaggcctattcagttatgcacagaaggataccttgccggcaaaattgaggtctgactacgagctgcttaaggacgagattctcaatctgggtattgaccttacgatatga

SEQ ID NO: 14446 - RNA, 1182 nt, synthetic construct
  source 1..1182: mol_type = other RNA
atggaagattgtgaaggatttagtgatgaggagttggacgacgtggagtattcggttcagctggcagcagagaatgaggagtttgaatggaggttgcaacgagagattcagcggaagagaaaggaaattccagccttggtgtggctggcgcaccagatgaagatcgccccggacaacctcgacactgttcttaatatggtaaggaacgatcagtccccctataggatgatcacactggataaacctgatggaggtaaacggcggatcttcatccctatagaccctctcaaacggatccaaaggaaaatagtgaaatgcattttgtccgactttcaaactgggccaaactgctacggattctcaggtgggtccatcgtagaagccatagaaccccatctccaggcaggcaccattttatatgtcgacatccgcgacgcttttagctctagttccgccgagatggttatgagctaccttacagaaggaagggtccccacattcagatacgattacaatgggaagtcatggccttattgctatgacgaagatggcgagagaggcctccactacgggtctactaggcgactcgtgttcgaaggtatgctgagagaaggccgcatgtcttggagtgctgctcgcataatcgtggatctgacgacatacccagtcattggatctacgtgtgtcctgcctcaaggagctcctaccagcccctggctgttcgacatggtgtgtaagaaactggatgagaagctaaccgcatttgcgcagaaagttggcgggaagtatactcgttacgccgataacatttttttctcaatggaccaggatgaattcccaaacccggtcaagaatgccgtactgcgcatgatccggatgtatggccgtttccggccccacaaaattcgagtgcggagaatgactaagggcgctgtgaaactgcttggcctaaatgtgattgaggggcagatccataatacacgcgagttcaagaggcgcctcagattagccatccatcacgtggagtggtttctgaacaatcgactgaaggacaccccagaattcgacaccgcatggcacaaacttcagggtctgatggcctttgctagaatcgataccttaccacccaagctcctggagagctactacgagcttgaggaccgtatttttaagataaactga

SEQ ID NO: 14447 - RNA, 1089 nt, synthetic construct
  source 1..1089: mol_type = other RNA
atgaactgggaggacgaactgtccgatcgctttttaagcaatggccatcagttgacgatgaaagagctggaagagcaccgcttgcaggacaggatcaagaaatctcggcgacgaattgattatcggaagaaaagtttcttctggctggggcataaactcgagctgccacactggctgaacctgtccgagatgctccagcgtattgatgtcgaaggatcagcctatttatacaaagaaccccagataattccgaaaccagaaggtggtacacggatcattcttagccctcaggctgacctgaagctagttcagacccggatcaataggctgttgctaaagaccttccccagacgccctgagacattcggctacatggggggcagctgtttggaactcgcccaaagacacctgggtatggcctccaccctcaagtttgatatcaaggatgcgttctttcaagtaccttggacaaatgtgcgcaagtccgtgaagggcttcagggggatagcacccgggttttcgggtagtgtatctcattggatcgctaagctgtgcacctactctccaactcccgaacacattaggaaccagtttggactctggaggggagccactagttttttgccccaaggggcgccgacaagcccaatatgctttcatctggcttgtgggcctcttgacgacgagatgactaaacttgcaaagaggttcggaggagtctggtcacgctatgctgacaattactacttttctatgccaacacctcagatctcaaacaagcttgaggagatcgttgtgtgtgaagcccggacgaagggattcaagattcacaaagtgagaagagtcaaacagggcgagttatgcagaatcctcggctacaacctgctagacggacgaatagccaatactcgtgattttaaccgtaacttccgcggcgcactttacgtgctcaggaccaaactggaccgagggctcgactatcgggatgcatatagcagagtgaagggcttcatgggcatggccattaatgttcccgagaatctgagactggagtatgattactgcaaaaacaagatcgaaaccatctga

SEQ ID NO: 14448 - RNA, 984 nt, synthetic construct
  source 1..984: mol_type = other RNA
atgagatctatagaacctgtaatcttctccagcggagagggaagatttccagcagaggggctcgaagtcgactataatcgttttggcttcaaccctctggtgtatctcggtttccttataggcattccaacccgatggatcgattacgttattaagattggggctgacaatttttacactgaggtgcggatccccaaaaaaggcggaggagtgcgggtactgcaggtcccactggatcccctgatgggcattcagcgccgcatcctgaggaaggtgctgtctcaattggagcccaaatcatcctgccacggctttgtcaccggccggtcgatcataacaaacgcgcaggtgcatgtcggttccacgcatatgctggttctggatcttgaaagcgccttcgaccaagggttatcaagccgaatcttcagggagctgtggggagaacgcgtcggcgaaagaagactggggttcttagtggcctcccttattacccaactgtgtactgtctacagcggcgacatcggggagagatatggctttaggcatctgccgcagggtgccccaacatctcctgctctcttcaaccttgcttgcaggcctctcgatggccggctcgaccactttgtgtggcggatcgggggtgtgtataccaggtacgcagataatctggcatttagtgtgcctagacagctgactccgaaggaagagcatatcattcggaagattgtagacgggagtggattccgcgttaatgacgctaaaacaagattaatgaggcagtcaggccacagtatcctacgcctcccaggagtggccattaacaacgggcgtatcattttgcccaagcggaaacgaaagcagttgagggcagccatatacttggcggcccttcacggagagacagatcgcctcaggggtctaatcggcttcgttgaacaggtgtacgggcccgaggttccccgacagatcattggatctcactga

SEQ ID NO: 14449 - RNA, 1017 nt, synthetic construct
  source 1..1017: mol_type = other RNA
atgcctacactcactggacgtcagtacgccgcaggccgaaaacttgctaggcgcctagatttacctcccgatcagctgttcctcgtgcttgaatatggtgcagccgctttttacgggagttacgcacagcctaaatccggagggggcacccgtatcattcacgtgccccacgaaccattggtaacaattcagcaagccatccttaagaggtacttctcctgtctgcctgtcagcccaattgctcatggctgtgttgcgggtcggggcattgaatccaacgccttcccacacagaaaggctaggtctatggtgggctttgatctcaaggacgcgtataaccaggcctcttttacccggagcttcatccagacctaccaccaccattatacaacgtcaaacggagaggtgatcgagagatggtgctcacagcggaagcagccttgggacattttgcccatggagctcgcggttctggagatcgtctcagatcttgtcgacatttatagcgattataaggaggtgctgccgcattataaactggtactgccccaaggagcccctacttcgcccgcactctttaacttcgcctgccagcgaatggacgctaggctggagcatctggcaagtaacgtgggcggagtggtgactcgcttcgtggacaatatagtcttctcttgggaaaatgatgaagttgaccgccccgtatatagcgccatccggcggattatcgagaagtccgggtttaaggtcaatgaaaggaagaccgtggccataagaaatggcaacagaaacggggtgccactgcgctttccaggcgttcatatcatagacggagatttgtacataccccggaaaaagttgagacacctgagaatggccctgcactgcgctgggaaagcccacaatgacgcactctaccaggggatcaaaggctacgccctacaggtcgaggctcaaatgccgccgcaattacgaggtgtgtacggtaaagcacgcgctgacaatccaaggatctga

SEQ ID NO: 14450 - RNA, 966 nt, synthetic construct
  source 1..966: mol_type = other RNA
atgtctctaacactggagattggccttcaagataataaacccgcaattaagtcctataagactgaactgagccaatatctgtccgacttgactcaccctctagaagtcctcgagatatcacaccgccgcaaggaacttaccgatatcttattagatttgacggaaaccacacagctgagtcttctgtgtgatgagtcagaaactctcgatcatttgttcgatgggctcctgcagctccgaaaggagaagaggccgctctacaagcggttccagaaagagatcaacggcaaaacgcgggacctggcagtccctcagaaacccctggacctcttcctaagaaattacgctggacccataatcaatcaggcagaatgccacgctcaagctcatggaggagaaaacaactggtctttgaccgagagcattaaaacacacctgcccataggtattgctctgtcctttgacctgtcccaggcgtttaagaacacccacctccagtacgtattcgacttttactacagcctgatctacaagaaaaccagagacaagaaaacttctactgacctcgcgggctttttagccacagtgtccactgtgtactacagggatggtgggtatgcacttccacagggcagcaatatagccacaaaactgtttaaccgtctgctgtatccaatcgacgagagcctgtcaaactacgccaagaaccgaaacttaacgtatacccggtggatcgacgattttatcctggccagtaaagacagagacaagaccaataaggagcttattgaggccactaatattgttcagccatacttccctctgtctgaaaagaaaacattccttcagagggataagcctgtgtatctcttggggcagaaaatcgtggattgctggatcacaaaggccacaaccaaggagattcaatcgaaaaatccaatgaagagtaccacccattatttgtga

SEQ ID NO: 14451 - RNA, 954 nt, synthetic construct
  source 1..954: mol_type = other RNA
atggacctcgctgtttgtgatcagtacaagaaggtgaagctgcaagttcagatccataccaaggaacttactgactatttgcactccattgagcattcactccagttgctggaagacactaataagcgcaaggatgtaactagcatcctcctggagttcactaaaacaagccagctttccctgctgggcgatgaagcaaaaaccctggacgtggtgctagaaaacctattagatctgagacgggccaaacggcccctctataagaggttcaaaattaaggtgggagagaaaatccgggacatatcagtcccacaaaaatctctcgaactgttccttaagtattacgttagccccctgattgaccacgccaaatgtcacgcacagagtcatggcggggaggtgggatgcacacctaagtactccattaagtcgatcctgcctgtcgagtttgtactcagctttgaccttaaggatgcttataaaaacatcgacctgcagtacatattcgacttttactatgacctgattttcgagaaaacgaaggatgtggagaagagcaagcagacggccggctttttggcgggtgtgtctacagtctactatgcagacagaggctatgccctgccccaagggtcacctatctgcagtaaattatttaaccgcgtcctgctgccaattgataatctcttgtacaaatactccctcgagattggccttgattacgtgaggtgggttgacgattttatatttagtagctccgattgcgggctgacactagataagttcgtgaaaaccttggacatcgtgagaaattacttcccgatctctgagaataagacctacttccagcgaaaacacccagtatatttgttaggacacaagatcgtcggtaccgatatatcagaagctaccactgaggaactcgaaacaaggcgtcagatcaacctgtcttga

SEQ ID NO: 14452 - RNA, 1089 nt, synthetic construct
  source 1..1089: mol_type = other RNA
atgcccgccgttctggaagaggtgccgattaatgactcccctctggtgctgggcgtcccaggacactattacagcttcttcggtggaccgttattcctcggaattcatgacgataaactcagggagcactacgaaaagattaagataccactcaacatactgagggatgatgagaaacgtcgcaacttggctgagctcttatcctcattaaatccaaaaccgggccttttttccggagagtctgacctagaggagctgttcccactgatcctggagcagaagcacttgtaccaaatctggaaacagaaggtgaatggcaaagagagaagtttttacgtacctcagaaggcctttaagaccctacttacgaactacgtgctcccctttgttaaagcagtacccgcgcatcccagttgtcatggcggagagaaaggctggacagtgaaaaaaagcctcgaatcacatcttcccgtcgtgtcaagcctgacttttgatatgtcagctgcctaccatcaggccaccatgaattacgtttttgagttcttttacgactctcttgaaggccgttgcaagaccgaggagcaacgacgggacgctgcagtgttcctgtccgccgtgtgtaccattcgcaaggactacgacgaaagaagagaagaatgcttcgaggcatctttgcccgaggggagcgccgttagcagtgctgtctttaaccgaatgctgctccctattgacgaagaattctctcggttcgccgagaagaagggtatcaagtattccaggtggatcgacgactttgtcttcacctcgcctaagaaacgcaagttcaaccacttcgagtatgtcatgcggaaggcacaggaatcctttacactggcacctagaaaagtgtttttcacttatgagggggtgtcttatctgttgggccacaagatcgcgtataatgaaatcgaaaagatcagtagggaggaattcgagaaacagcggggagaaccatatacaggggggatgctgagcgatacacacccttgggattgcatgtacgaaggttatgaggaaccaacttgtgatgggaacgatatacccttttga

SEQ ID NO: 14453 - RNA, 1218 nt, synthetic construct
  source 1..1218: mol_type = other RNA
atggaggaccgtatgtacgccccaagcggtagacggttccgcatctttgttgactgtatgagcatggggagccggctggacgtgatcccttcagagaatccagatctagaaattgacactgatggaacgccaactattttcctaagttctgtgccattggtgccgggggcttattttaccggcccgtggctgccgatgtcttatgccgatgagctagtcaaatatttttctgagacaaggaatcccctggaggtgctggagagcaagaaggaaataatactcaagaccctcctggaattactccctttggacaatcaactttctatgttggacaataaacaggagaggctggaggtgttgttagatgacttgctggccctcaaaggcgaacgaaagcatctgtaccagcgctggtcacaaaggatcaacgggaaagttagggacatttccattccccaggattccctcgaacatttactcatcgagtacgtaaaacccatcatcatggaggctccttgtcacagccagtgccatggaggcgaacagggattctcaccaaagaagtcgctgtcccgacacctgcccctgggtactgtgctgagctttgacctggccaacgctttcaagaacacacacattcagtatgtgtttgatttctactacacgctcttcgagaataaaatcgagaaccgcgaaatacggcgtgacatcgcaggctttctgacatccatcagcactgtatactatagtgatacccaaatctctgcgctgcctgtgggcagtcctatttccatctgcctcttcaaccggctgttttatccaattgacgaagtgctgcatatctgcgcccttaagaaggggttaagatataccagatgggtcgatgatatcaccatctcagcaaaagaaacaaaccggaatcctgaaaagatatgtggtgccatttcgatggttaggcgcgaatttcccatagcagttaataaggtgttctttcagcagaatgtccccgagttctaccttcttgggcacaagattatcggcaacagaatcaccaagatgaacaaagagaagtccaaagacaaattggtcccccttgatcccgagtgcattgctacagagagagagatagagtggattcacgaggtctacatgggcgagattcctcctaaccagggagaatgtagtctcgaaggacttgaagaagatctgccattctga

SEQ ID NO: 14454 - RNA, 1164 nt, synthetic construct
  source 1..1164: mol_type = other RNA
atgtccatagaggccgagatcaagtcgtgcaatgacgtcttcgtggaggggagtttttataagcacaaatacgaggatgagacatctgcaatactgctcaaagaaaggctgggcattcccgttgcctatttccgaggcccctggctgccgatgttttatattaacgagtgtatggagtactccttctctcttgattacccctcccagatcttggaaataccaaagcgcagaaaacaaattgtggatgctatgctcgagcttcgctccgcccagcagcaagcatcacttttcaacatcgacgagaagcaggacttggaaagcctcctggacaggctcctcattctgaagaataataataggcccttatacaagcggtggacccagaatattgacgggaaaaagagagaactgtccgttccccagaaggccctggacgtgctgctgaaaaactacgtgcacgacattatcatgctcgctccatgtcacccacagtgccatggaggtgagaaaggttggtctgtaaaaaaatctctggcgacccatacacctctgggaactgtgttgtccttcgacctcgctaacgccttcaagaacgttgacatccaatacgtgttcgacttctattaccggctgtttgagagcaaaataagcgatcctgaaaacaggagagacactgcggggtttctgaccactttaagcacagtctactataaagacaaggacagctttgcactacctcaaggcagtcccgtgagtatccctctgttcaaccgccttttttacccgatcgataagctaatgcaggagtcagctaccaagcgcaacctgaggtatacccggtggatcgatgacctcattatttctgcaaaagagagcaaccgtaatcgaaagaagttttttggctcattatcaatcgtaagagaagatttccctgtcaatttgaataagacattctttcagcagaacctaccagaatactttttgctgggtcataagatcatcggcaaccttgtcatcaaggtgagtaaggatgaagaaaaaaatcgtggggagcagattgacccagattgcttcgccacgcactatgagcgggaacacctgtggatcgaagattattacgacggcgatgagcctggagattttggagaaattaaagatttctga

SEQ ID NO: 14455 - RNA, 933 nt, synthetic construct
  source 1..933: mol_type = other RNA
atgcctgtgtacgaaagagaatttttcgactatgtcgagtcaaatcttcaccctaccggatcagtcttagccaatccctgccgccgaggaagtttgagacgtctgttgagcccggggacacaggaggacctgtttggagatcctctagaggtgatcctcgaacggctgagtggcgatattgtcaatcggaaaggtgggtatatgcgctggagggaaaagatcggagagaaagagaggatgctcagcgttccttccaagacactgtggaaatttctcgaagattatctggaacccttcattgaaaaacagcgtgttcacgggagctgccatgggggcatcaagggctggtccccaaagtcttccttagaatctcacctgccaatcgtgactgccctgtcttttgatatggagagcgcattccagaacatgcccgcccgaaaggtcttcgacttcttctactgttcactcaagggtattgacaactacgaggaaaggcgcgacattgcaggattcctgacgttcatctccaccgtgagatatgatcaacaacgcggcttgcctcagggctccccgatctctcaggctatattcaatcggttgatgctggaggtagatgagactatgttttgggccgctaccgagcgggggatgacatacagtcggtgggtggacgatttcaccgtgtcaagcccagacagacgggatgtcagagagtttctcggcgccgtaaatctgctcgcggagagatttcccgtggctcgtgacaaagtgtactttcaggagggggaacccgtgtaccttctaggtcataagcttgttggcggtagggttctgaaaaactcgcgcgaagagaggcttcgcaacaagactccaccactggactactataagtggctgagcaacaggcgagcatttgagccctggataaactga

SEQ ID NO: 14456 - RNA, 924 nt, synthetic construct
  source 1..924: mol_type = other RNA
atgaatcccaaggtggataggctgaatgagtattgtcgacgctttggtccggggttccgggtcctggatgatgttcgcaatgtgctcgttgattttctcgctggcctggacaggcagttggacctctttgaaagtcccgagcagcgggcccttagctccttagaagctctaagggtccacgacggaagcctttacaatcgctggtcttttagcgataaccgaaaacgtagagagttgtcagtaccttgtgagccattgaaggtatttatagatgactacctcatccctctaatcaagcggaccaaagtccacgagtgttgtcatggcgcggagcctggctggtcgccaagaagatccctggaagatcacctgccctgctattccgtgttgagcttcgatctcaaaagtgcattcaataactttacgatcgccgaagtcttcgatttttactattctctcgacctggaaggcctagaggaggacgaaaaaatcgccgtggccggattcctcagtatgatttcatcaagcctggtggatggacgacgcgttctgccgacaggagcttctcattctccccttctgttcaaccgggggttgttagaacttgacgatgagttatacgaagggtgctccagaaaggggttcaactacaccagatggctggacgacattacaattagctcacagggtaaagtgtgcatcgaagagctgctgggcgcagtggagctgactgaacgttatttccctgtcgctccaaacaagatattcttccaaaaggcagacgagcccatttatctgctgggccatgttatctatctcggtagggtgtgcaagaactcccggactgagcgcgacgcccacaaggtgaaaccacttgactacgatgagtggtttggagacagggggtacgagggctgggaatga

SEQ ID NO: 14457 - RNA, 954 nt, synthetic construct
  source 1..954: mol_type = other RNA
atgcttaacgaagtggtggtgaatttaagagacgaatccctcattgaagctgccggcgcggtgatcgatgccgctataacccctcgcaaccgtatctctaccttgtttcctgaggtagacgaggcctatcggccagcaaatctgtggcgagatgtcttagaaatgctggaccagggaagaagcctatacagtcgcttccagaaagccgacagcaatggcagggtaagggacatctcagttccccaagcagcctttctcgagtttgtgaataggtgtctgatccccctggtgaaatccgtgccaagccacccggcatcccatggaattgagaagggctggtccgctgaaagatccgtgaagacacacgttcctatacgtaccgcatttagcatggatatctcggatgccatacctggcgtgggtattgacaaagtttatgatttctactacgctctgctagaagattcaaagttcgggctgactgagcgggaaagagctggcgtggctggcaacttggcctacctgtcaacggtgcactatgcctctcgagggactagagggctggctgttgggtctggcctcagcaacactcttttcaataagctgttcatgggtattgacgtcgcaattcaagagggttgcaatcggaggggatttaggtacagtagatatctggacgacgtcaccgtaacaagtgaaggcgatgagtcaaacgaggcattcctggggatccatcccgttgtggcggcccatggatttcgcattagcccacgcaaaacattcgtgcagaaggcctctgagggtgacatctacctcctcgggcaggttgtcgtcaacggacgggcggtcatgaagaattccagggagatccgagaggccaacaagaaaggccggcttgagcccgagtacattgaacgggtcttgagctctggagattatagtcgctggatctga

SEQ ID NO: 14458 - RNA, 939 nt, synthetic construct
  source 1..939: mol_type = other RNA
atgatcatcgaacagcaaagcagcattcacattacacagtatctgaatcgtattatggaagaggaccacaccccttcctaccagaggatctggatcgataaatatcatggcaccaccatattcaatccacagcaaatagcggaactaactgtaaagcaaaaggaagagccgcgccgagcggaccagagatatgtccggactttgggtcctgatccaaaaaccaaacagtggtgtcagactcttaatgatctgttgctccaatcccgggagccacaccccaattcccatggcttggaaaaaggccggaacactagtacatacatagagccccatagaactcaaaagaaggttttgagtgtctcgctctacaacgccttctcttcagttgggaaaaaaagggtgacatctatcgccaggcacctgttaggaattgaggggaacgctgccacattctttggcgagattgctaccaaacacggaaaactgaacctgggcaaccctctggctccccagctgctgaatatccaggcctataaaatggaccgctatctcacagacttcgtgagaaagtacggcctagaatactccagatttctcgacgagcttacattttctagcgcatactttatacagaccgagactatcgcaaaaatcaagagaattatctctcggtgcgggtggatgatcgataatgaaaccgtgaacatccagagcggtaatcatttcattattgccgggcatgtagtcgtgcctcgcgagggtgtggtgcgagagaagaaggagcacaggaaggaagcaacgaacacgataccaagtatcaaccagtcacacacaaaccaggctaataaggccctgaagacccttaccaaccccagcgatcggctgtcacgtgagaagggactcattaggaatctgaagggattacttaaccgcaagtga

SEQ ID NO: 14459 - RNA, 1278 nt, synthetic construct
  source 1..1278: mol_type = other RNA
atgagtaggaaacaaaataaggtgagtaactcacacaataagtcgtggtccaactaccggcaagtttcatacatcaaaacatccgttgtccgccagatcggggtcgaggagctgaaacgaataaacaagcgcatcttcgtgctgatgaagcggagcgagggcttttttaaagaagaaaaggcccgaatgctggtggtaaaacaagcaaacggatacttccgtggccagaaggtgattagtcaggcagatcaacgcgctcttaaggcgactggcggtaagtatcgtgaggtcaccttcctcaaggacaaggcaacccgcaagatgctaaggaaagtcgctaagctcatcgatattccgcacgccgatcaggtgggttttactagaaagcgcagtatttgggatgcagctgcccgcttaggcgacgccaaatctatcgttaacatagacctcgaaaacgcatttaatgctattccagagcaggccgtctatttgattcttcggcgtgtgttcgacctgaacaaaaagcacgccagacagctaactaacgctattacagacggaggatacctgtatcagggaagccctttagctccccttattttcaatttgtggacaagaccaatcatggactccgtacggggagccggctttgatatcgtggcgtacgctgacgatctgacaatcggttctgactacggggctatcagccataaaatggttagggtgttcattaagtggataaggcagttcaatatgaacgtgaacatggccaaggtgaagttctacaacataaaaaaggcctacaaagagactgtgggtttgaagtccatccgctccggaggggggatactcacaacccctgtgaagtttaggaaaggcctgagaaagctcaggtacctgacacacctgtataccgttaatggcgtgacgcataccagacgcgtaaataaagaaggagagcccaatgagctggggttcgtgattttggggtcttggatttggctttctgaagcagaaagaagaggggtcgcgagagtggacactgcactgtataagaagctcaaaaaaagcgtgcccgccatcatcgaggactggaaaattaaacggcggtcttataatgttgatcaccagtcatgctttacgaccgatagcatccctcatatcccccaggatacccgaggcaagtggaaagtcatctacaccagccatcagggccgactgagggaaggcgtctataggaagcggctgtcagcccgagtacggaggccatttagatga

SEQ ID NO: 14460 - RNA, 1095 nt, synthetic construct
  source 1..1095: mol_type = other RNA
atggagttcaaagataccctggcaaaagggatgagctacacaaagcagagtatcgctcgttacaaccccaacgtcaatctgcataaattgggcgcgaaaatcgtggcttggcataacgccaataaaggactgagctactccatgaaaacaatgtatgttgtcaaaaacgacccgttaggacggttcaagaaaggcgcaaaacactttgagaaggtggatggcattacctaccgcaatatcaggttctacaagagggagacgcgggagaagctcgtggaaattctggattgtcttgacctggaacaccccaatcaaatcggcttctctagaggcaaagggataaaggacatgctgaagcttgataacataggggagaggaccaagataaagctcgatctgtctaacgccttcgataatattaccaaggagcagttgaaagccctgctggtgatcgtctttgagatcaggcctaagatcgcagaagaaattgcctcagcctggactgtgaacggtcacatggtccagggtcatccactaacccccgcagttttcaatttactgaccagacaagctgtagacttcgtgataaagtacgtaaagaattgcgggatcatccagtatgccgacgacatcctaatttggcacgacacacacgattacgtttcctggaagactattagaatggtgtgcaaagccttcaaaagagccggatttcctatgaacactgaaaaggagggcttttatcacaagggggcagaaattcagttcgtgggtctgcggtatcgtcgagacactgacggaaagtataaatggtttcccaaggagatgcgcaaaaacaaggcccgcctcagagcgtacaagcatctcaaagctctgggccacctcggtcttgatcataaggagaaaggatatactgaatggctgttgtttcgaaagcgcaataagcagaacaacaaacagattcaaacgcttaagggggagtgggtcgatttcgacaaggctgtggagacaatgctcaaattgtttccaacaaaggaagaacctcagtgggctgaatttaataggctcccaatccgggagtttttactgatttga

SEQ ID NO: 14461 - RNA, 1185 nt, synthetic construct
  source 1..1185: mol_type = other RNA
atgtattacaaacgagagaatcttgccactttacgccaggagctaattaggcatgtgggaatagaggagttcaataagatttcagcgactgtgcgaacaaagctggaaaatttcgaatactacagaatcggatacagcagtttctggatcaataagcgcaccaaagctaaagtcttcagcaagtccgaaatcctgaagtctaacgatgagcaccggcccattaaaagtcctaagaaagatctgaaggtcctcaccaaggagattaatgagctgttttccagctttacatccaaccgttattatataaagggattcgtcaaggatgaaggcgtacagaccaacgcagagtatttccggaaatacggcggtatcaaattcgggctgaacatggatctcgagaacgcatttaaccagatcgattacggcaacttgaaagatttcgggaaaattgttatggggtggaatgccaaagtgtctgaaaaatttgctaagttgctgactatcaagggtcagatggtgcaggggaatcctctgtctccgaccatgctgaatctttttgcaatacccatggacctgacaatcattgaattttccaagagtcaaacagcccccttactttacacgcggtacgctgacgacatgctgatcggcagcagaacaaaaatcgactttaagaccttcatcaacctcctcaagataattaaacagttcggctttaaagtgaagaaaaagaagaccaagttcatgaagaacaatattgagatcaccggtatcattctctataacggaaagagatggaaaacgaaacggggaaggaagcgtagacttgttaagaaaatccgcctgatgaaacatctccaatctctgggccttaaacacacaaagagattgaacaaagaaggcaagctaattgagatatcctgcgtgatttcagggatcctggcctggttatatccagcctcaagcaagaaaaaaaaaagtaggaagaaccggaagactaagcaaaactccaaattgaacaggaagttttcgaagaccaaacatgacaagtctctcgccaagcagaataagaagttttcaaaggacaaaaggcagaaagttgctaagaatgtagaagaggaatatcgcatcttctgtatgacaaatcaccacattctgcgccgaaatagcccaactactacctga

SEQ ID NO: 14462 - RNA, 1032 nt, synthetic construct
  source 1..1032: mol_type = other RNA
atgggccataaaccatgccggtcatgtggtgaaggcggctacgctgagaggcagaaccagttcaacttccagttgctgagcttcagtcacgtgaaactgaaccccaatagctgtctgagtgccacacccgtgagggtcctgggaatcttgacaatgttcacgcgaaagactgtctatgatgttaatcggatgtccggccagaagaaggcccgggaagtgtgcaatcctggccgccacctccgaacaatccatggggcattgcgcaggagcttggctcctctcgttagcgccctcgcttattccgccggatgccgcaaaggggattccccacgacgtcggcttctccgccacctaggtgacgttcacttctacctcattgacctgaaatctgcctacagggctgtccaactggctcccatggcgcgcatcctggctaggatttcccctagctgtctgttgccctctgcagaccaaagtggacagtataatctcccttacctgaccgagcaggagtcagagcgctggctgctgcagtacgcatttgatgacaaattcggagggttaatggtaggcgctccggccagcccggacctttttaacctttacgcgggagagatgattgacgcacccctgtcaaagctggccgcaagatatgggcttcgatacagccgttatctggatgatctgctattctcagcccccgccgataacccaataggtcaaaagaaacggagagccatcagaaggatcctcactgaagttgggtttgctgtgtccgaccacaagtctagactctgggacatacggaagggtccaatcgtcgtgaacggagtcggtctggatgtgtcgggccgtttttttgtgccaggcgcctttatgaggcggcttaacggaattgcacatttggtaagaagaaggatgctgcctatctctaatctcggcggcctattaggggcggtgaagaatattctgtctacccagcatcttaatagaagtcaggggaaggtgttagctgccgccgcatccacctga

SEQ ID NO: 14463 - RNA, 987 nt, synthetic construct
  source 1..987: mol_type = other RNA
atgtacaaaatctccgatttcttggctgagttggaacggagcgcctataccaagcccggcgaactgtcactccgcccgactttttccgagccgcctaaatgggaaaggtgggctatcagagacatcaacccattatctggtcaaaagaaggtgcgcatgctgactgttcccaatgaggccctccgttttctgcacaagggcctgatctacctgctgagggtgagcaagaaggcatctagtgcgcttcattatgcccgaggcgctagacctggatttagccaccagaggttagtgtcagagcaccgaggtaaccgcttcttttatgtggtcgacctgaaagatgcgtactcccaggtcgaccatagcctcatgattaagattgtgatcgagtttctacgagcaattccacacttcgaggccttctctgaggaggatgaagccggtgtgacgatattcctggagcgatacttccttttgccagaaattcctggcttgcccgtaggactcccagcttctcctgatctttttaacgcctacatcgggaccctggtcaattggcgcatctcgaagatgatatcagccggccactacacacattatctggacgacctggttttcagttttcgtagtagaccttccagaaaaaaaaggcgggagattagagaaacactgaagcagtggagactcccaatcaatcatgggaagtgccaattcaaggacttaaaaaaaggccccatcgtgattacagggattggactggagtacggcggaaggatgttcatcccccgcaattatactaggaagatagcaggactagtccaccgggcactggaaaccagggatccccacgagatagctcgcgcacgtgggatggtcgggcttgttttgcataccctcaaagtggcccggcaggtaccaaatcagcacgaagagaagcttctccggagctttcggaaactgcaggatgaccctgaaaacaacagatga

SEQ ID NO: 14464 - RNA, 951 nt, synthetic construct
  source 1..951: mol_type = other RNA
atgttcatcgacattaaggagtttctggagattcacgatgatcccagatttgacaagtacaccttgagggatgtcaaccccgtgtccaagcacatcaaaactcgcgaaatcagcaatcccaataaaagcatgagagaaatccataggcggataatacaggcagtgaaagacgtctaccttgattcatcgaatcacttcagtagtacacaccaaaatgcggataggcacaacagctcccgatttttctatcagaccgacctcatgcacgcttacgcctcagtgccgttagaggggctcgttactattctgtcttcccttaaaccaacatggggcaccaagaatgttagagagatcttgacaacctactgctttgacgagagcggagcaggtcttatagtgggggcaccggccagccctattctgtttaacatctacgcctggcagacacttgacatccctctgctagaattttggccatatatgaacgacgaaggtcaaattttccggaagttctacacgcggtacctggacgatctcaccttcagctctcctgagccaattacagattctattcggaggtccatcagacgagtggtcgagcaggcgggctttcaaatcaaccatcgtaagtcaacggtcagagatctgaaaaaaggccccgtagtaataactggcgtggggctggaatatcggcccaggcgatctgcccgtctattcctgccacgccactatttgaaacgcatgaacggactgctgcatctcgccctcaagggcgaccctcgggttagtcactctgaaatcgagggcctgatgggtgtgttctacggagtgttgggaagaaagcatcgccagtcccatcagagtaccaagctcaatgctactgaatcaaggttcttagagatgtatggggcttatcgtgctcagtatgagcgcgccactaaccgcaagtga

SEQ ID NO: 14465 - RNA, 927 nt, synthetic construct
  source 1..927: mol_type = other RNA
atgttcatactgttctcctcttttgtgaagggacttcccgggagggaggcacctggcttcaaattcttttttctacaggatcggaatcccctcgccagacggcgtaaacgcagacacgtcggagcgccgaatgaagcaatgtggcgccttcactggcgcctgatccaatggcttcgaagcccagggctcaatcggggacgcagatacagcacaggttgtggccacctagatagcccaaggcgaaacattctaaggcacagaggaaaccggtttttatacttactggacatcaaggatgcctatccaaatgtcaacctcgataagctcgctaagatactgtatgaactggccatccatctggttccggaggacaaaataaagcttttccttaagctgttctgcttctcacctaacggtggactggtggtagggggccctgcttctcctgagctgtttaacctgtatgccgaatccttgctcgaccatccactcggggttttttgccacaagcatggtattaccttcagtcgttatctcgacgatttgacgttctcctgtagtacccctattggcaaacgcaagaggctcgagattaggaagattatccttaaggcaggctttaacatcaatcactcaaaagccaaagttgtggacctgaggaaaggccccgtggtaatcactggcattgggttgaatttgaacggcaagctgttcgtcccaggacattaccgtagaagaatcgatgccgtgtttcacaaggcggctaaaaaccccaaagacctgaaatacttggcaatcgggatgcatggactgtttagatctgtgatcccccgaggtgagctgaattcccggagtgaactgcgaacaattaaccggttcaggtcgtttctgagcgctaatcggaacaaggaggccttaacccgctga

SEQ ID NO: 14466 - RNA, 999 nt, synthetic construct
  source 1..999: mol_type = other RNA
atgtcagagaaacaattgagcatcgacttcccgaccgatcatttcttgttgcagaataaatcacctcttcccggatacaaaacggaagaaattgtaacctattcttcttcaggtaaacgcaaggttcgggtcatatgtaaacctaatgagacgctgcggattatgcacgacatcatgaaggaggtcctgtctcccgtgtataataagaagaatctgccttatgcttaccagtggatcaagggaataagtacaccccccatcgcagctctacagcatcacaaggaaaacagaaagttctacccacgacactggtttgtcaccgatctcaagtcagcttaccactccatggatctgatcgaggcctccatctacgtggagatcttttgccagattaacggcatcaaccctgtgattgattggacaatatctatgatactctactgcactgacccaaacatgacccttgcagaaggactgcccgttagtccgtggctcttcaacatctacgcacactacaagctggacatttatctcgccctactggcgcataaatacaatgcccgttacagccgcttaggcgacgatctgattttttccagcccagaaccttttggtaagaggaagagaaaggccattctgggctttgtaaggaaccaagggttcactatttccgaaagaaagaccaaggtgatcgatttgacaaaaaatcatggcgcgtcgattaacggtatcgggatccggaacacagttagcaaaggggagcttttcctgcctcgagattatagggctaaaataaaagggctgctccacgtcgcactttatgggctcgacgagaatggcaggctgaatgacccaagcaattttccagagatcaacggaatgatggccatcttcaagaagttagtgcccaaaaacgtggactcctggactaaggatgacgactggattgtggagaactatgaaattttccgcgagagttttcataataaagccggctga

SEQ ID NO: 14467 - RNA, 966 nt, synthetic construct
  source 1..966: mol_type = other RNA
atgattccttcactgagaggcctgctgattcttgaccccgagccctcttcccagaaaggaggtggcaggaagcacaacaagaataaattgcattacatccccaacgactctctgcgggtgctgcatgcctatgccttaagaaagattgaggagtacatttttgagatgccaagtgcaaccgggtggataaagggacgcggcagcatcaccaaggaccatattctaagtcacacaaacggacaaggtttttttcacgaatattggtacatcactgacattaaggatgctttcaggagcgtgaatcttcagaagatgtcatgggtactgtgcaacctctttccttactatgacttcaccaactggccagatatgaaggaatacctcaagaaatacttcttcgcaccgggaggctccggattagctgagggctatagcacatctcctaagctgttcaatatatacgccgagaaaatgattgaccagcactttagagaactgtgtactcaatataacatcagctacactagatttggagatgacctcatattcacttctgacaccattatcgggaaaaaaaagaagaaggcattgctttcgatcctgcgagtggctgaattcacaccaaatgataataagacgcactcattcaatctcaataaactcaaggaaggtaaaatcatcaacggggttgggatccgcaatacttcaacccaggcggagatcttcttgcctcgcagcaagcggaagaaactggagatgctactttatttattctggtatgatgaggccaaactcaatcccaggaaaattgagggtctgatgggctggtttaaccaggtcacggatagttccaagaaagggaaaaggaccctgaacacatccgaagaaaaaatcctcaagtactacaaccgggcctcctttggcttgaaagaactgatacgagaaatgcgtgaggagacaacctga

SEQ ID NO: 14468 - RNA, 1191 nt, synthetic construct
  source 1..1191: mol_type = other RNA
atggcacggcgatgtgtcccggtcgttgcctccacacctatgtgcctggactcttgctccctgctgacaagcggtcgcagcacccaatactcctacagcagcggcagtcctcggctgatcacgggtttttatgatcttggagctaacatgcccctgcacaatactggacaattggaattggagttggaagccctcatggaagagcccttattccacagcttcattcacaaagacgttaatcggcttagtggaaacgtaaagtttcggagggtgagcgcccccaacaaagcaatgaggaagatccacctccagattcgcgcggcactcagtcgtctggatgtggaaatgccttatgtgaccgccggcctgcgaaaatccaaggtggttaatcacgtcaaggctcatagagggaatcaatatctgtgttgctacgacttaaaagcggcttatgaccatgtccggcctgaggccatggctgatatcctgcggcagcatggccttcctgaatccgacattgagttggtggcccgatattgtttcggcaacgagtcaggagggctggtaaccggaggactcgtatcagtgcagctatttaacctgtacgccaacgaagtgattgatcagcccctggctacacttttcgccgagagggggggcattacttacacacgctacattgatgacctgatcatcagttctggtgctcccattggaagacgtttcagacgatcaatactgcagataatccgcgccgccggctttgagataaagcctgctaagactcagcttatcgacctcgcggcggaacactctcagatggccgtgctgaacgggatcgggttggacctgaatggcgagctacacgttcgcccccattacagagagctcctctaccgcctcatcaagcgggctcaggcaggggagatagatccatcagtcgtgcacggatgcatgggcgcattctatgtgatcaagccaagaggccaacagatgacccctggcgagcgcaagctagaccgtgcctacagatggtacgttaatcagcagaggagggcagatccaggtaggccagaaagaaggagacgtaaacaacagcagtatagggcaagacgccgattaaaaccgtcgtacaaaaggcatgggaggcggtctggtcccgtgggtacctatcggccaagaccaacgttttga

SEQ ID NO: 14469 - RNA, 984 nt, synthetic construct
  source 1..984: mol_type = other RNA
atgaagaccgaaaacaatcctgccttcaccaaacgggtctatcaggacttcaatcccgtgtctagacacagaaagacgaggattatttacgagccaaatcgattaatgaggcaggtccacgccaagtttttgaaggagttcggaggcttcctgccacgcggtctgcctattactgcttgtatcccgggggcgtcaccaaagatgaacctagaaccacataggcgaaacaggtatttctacctgactgatatacatagcgcgtattctggcgtgaatatctatagactggcctcacttttgtgcagcctgaggcctgaccttaaactcttcaggggtgacaagctgccccacgaacccctcgatctcttcagagctgaggacgggatggtgagctttctgaggtcctattttttcgccgaggagggaggattagcaacaggaggccccgcagcaccttttctgtttaacatttactgcgccaattttttggatgtacccctcatggaattgtgccgcaaatgggagcttacctacacgaggtacctggacgatctcacttttagcgccgcagacggcaaccccattggtgacaagaaaagagaagcaatccgtgccgttgtgatctccgctggcttcgaaatatctcatcgcaagagtcaggtgctggaccttaaaaaagggacaatttctatcaccgggatcggcctcgagtatggaggacgcctgtttatgcctcgggcttataccaacacactgagaggggctttataccgtgttgtccggcgccgatcggacgatgatgagcgggtgagagtacggggcatgtactccgctttccttagtctcatagatctgcggagtgccaattgtactgaaaagaagatcatcgagctagcggggcgtgcctttccacctaaaccgaaaaagccaggctacacacccaaaacctcctcacgacgcaagcgccggagacaactggagtga

SEQ ID NO: 14470 - RNA, 990 nt, synthetic construct
  source 1..990: mol_type = other RNA
atgtccaaggagacacgatctatcaccgcgccaccagctaccgagcggagattcataaacggtcgtaacggcggcaagagacgagaagttttcgtgcccaacgccgctatgcgggaagtccacgcgcaggtgattcgggagactcgtcttcagctgggcatcccctctcacaactttgggggcgttagaggcgggtctgctgttcgctgcgccatgcaacattggggtaatcactacgtctacaagctcgacttgtataacgcctacccttccgtaagacccgagtggctgtaccccgtactggcagaggtgaaatcagaactctgggtcgatcaggttggaatggaagactttgtgagacggtatttggctactccgcggggtcgcgggcttatgaccggaacacctgccgcaactgacctgttcaaccaggtggcggcacgcaaactggacgaggccctgattgagttagctgaaaggtggagccttacatataccaggtatatcgatgacctggtctttagcagttgggagcctattggaaggcggaaacgggaagctatcagagccgtcataaagaggagcggcttcaggttgaattacaagaagacaggctactacgacgtggcccgacgccctgtgatgatcactggactaagactgggcgcaggtccatcagccggggaagctagtgatgatatcaatcgagccttcgccatttatttaccacgcaagtggcttcagggactagagggatcgatgtattgtctggtcaatgggaaaagcaatagagtgggtaaggcaatcgagcctggggtggtagaagggaggatgggggctctgagggaacatctcgcactcggcggatttccctttgatcgccaggcagccttggtttggcgtaaatacacctatgtgaagccaattacgaggcccaaagtgccgctgtcccctatggaggagtggctccaacggctcttccgcggctga

SEQ ID NO: 14471 - RNA, 972 nt, synthetic construct
  source 1..972: mol_type = other RNA
atgtcaaacaagccgatcttggcggcccctgttgaaggggccgcctttagacacttctttttaaaagacgtcaaccccctcgggggtcgtacaaaaagacgccatatcagcgcgccaaacgctcagatgcgtgaagtgcactcggcactcatttcatacctgaggagcctgccagcagaccttagcgctgccactggcgcacgaaaggggcatagcagtattaccaacattttcccccatcggaataatagatacttcttgctcctggacattaaggatgcctatggcaccgtagacgaggagaagctggtgcaagtgctcctggagttggatccaacactccctagggacctctttggttctgaagtggttacccagtttctgcagcgttactgtcttaacaataagggcggcctattaacaggcgcacccgcttctccggacttatataatctttacgtcgccgtccttctggattctaaactgatcgaactgtgcaagcaatacggactgacatataccaggtacctcgatgatataactctgtcctccatgacacgcatagggaaaaagaagcggcaggccatctacggactgatgcgcgaagctggtctggtgatccacgagtcaaaaacccagatccttgatctgaatcggggccccgtgaaaatcgctggtttcactttgaatcaaaacaggtccataattcttcctcggtcctatctaggaaagattcgaggggccatccacaacgccatagagaaagggctgtgcgataaggctacgcaagtgcagatcagtggcatgatgagccagctcttggctagtctacaggacccctccgtacggagaaagggaggacgccgatatcgcagaaggcctaatagcactgagaaaagggttatggaccggtattgtgcgtacagacagctgtgcgcacagacgatttctccaaaactggccacctcatga

SEQ ID NO: 14472 - RNA, 951 nt, synthetic construct
  source 1..951: mol_type = other RNA
atgagtttcgagaacctggtgctgggatttgagctaaatccagctctattgggggggacccctgcattccggatcttcgccattagggataagaatccgttaagcaaaagggagaagggtcggcgtcctctggaggcacctaataatgccatgcggataatccacggcagactcatcaaatatctgagatccttgaaggtagagatgccttatgcgacagcatgtcgcccaggagactcaccgctgaaaaacgtggaacgtcacagacagagccggttcttttgtctgcttgacctgcgacgtgcttatcagtctgtgcaggttggcaagctggcaagtgtcctccaccaagccgacccccggttaaagggccagttctgggaggtgcgggccttcctccagaggtactgcatgtcccagacaggcggtgtacccgctggagctccagctagccccgatctgttcaacctttactgcgccgtccttttggacgaaaagatcgggaacctgtgtaggcaacatggcctgatctatacaaggtacgtcgacgatcttactatttcgggcaacattacggtgtcaagacgagtccgcgcccaagtgagagccatcattgcgtctgccgggtttaaagtgaatcatctgaagtctcagacccacgatctccagaaaagcaccctggtgattaatggcatcggtttagaactcggcggaagagtatttgtgcccccattttaccttaggcatgtgcgaggtttgctacacgaaggactgaagggggatctctccttggccccaaagattcagggcgcaatgtcagtggttctcgggatagtcaaccagcgaaaacccactgcctccgaacaacgcgttctcaggcagtgcaaacgctttagacgcctgataggacagaccaaacgggagcaacgcaaggcgcctgctcccgtttga

SEQ ID NO: 14473 - RNA, 1023 nt, synthetic construct
  source 1..1023: mol_type = other RNA
atgcaactttccctgcacgataagatttttggagtcggttttgacgaaacactgcgaacctttcccgagcctccagccatgcgcctgtatgtccggttctgtgggcacaccatgtcaggccacggcaagatgaggaagctggaggtaccaaacaaagcgatgagggaagtgcacatccgtctgctccggttcctgcggacattgcccagcgagtcctcttacgcaaccggttgtaaacctggcgacagtcccgccaagaatgtgaagagacacgcagggcagtgcttcttttacttagtggacctccggggtgccttccatagtgtggacatacccgtcctggccggcatcctacgaaaggcagctaagttgccgtctcgacaggagtcccaaatcctggccctgctcgagcggtactgtgcctcacattttggcgttgggggtttggctgaaggagtgccagcttccagcgacctcttcgatctgtattgcgccgtgaggatagataaacagctcggcccttattgcaagtggtggggaattcggtatacgcgctacgctgacgatctggttttctcgagcgagcgaccattaagtagaaagatcagacagtacattcgcagaattctggaagaggccggattcgctatctctcaccataaatgtgagctccgcgatctgaagaaaggacccattaagatcaacgggataggccttcagcctgatgggcggatgtttgtccccaggcctttcactagacggacccagcaccttctgcacctggtactcgagaaaggcaggtgggaactattgcttcaggttcaagggcgaatggcgctgtttcgccaacttacagacgtcagaaatccaaacaggactgaaaaacatctcttggagcagtatgcagcattacagcgcattctaagaaaagaaaagatgcgcgctcgtgagcagaaaaagagggtgaggcagtctggaagaccggaatacctgcatgtgtcacgtagccctatcgcctgctga

SEQ ID NO: 14474 - RNA, 939 nt, synthetic construct
  source 1..939: mol_type = other RNA
atgtttgacaatctgagcgatcttctcggggatgaaccgagtttcagggttcacagactgcgtgacgaaaataaggtgagtggcgtcacaaaatggcggaccatccatgcccctaacgatccaatgcgcaaactgcattctcgaatgattgtcgacctgcggctcttgcaaacaaaggtacacggccgctctccctacgctaccgctgtccttcctggtagctcacctcgacgcaatgtggagagacaccgcggcaagaggtatctatacttgctggatttgcactccgcttatctgtacgtgaagggaggagagctcgccttcatcctatgcactctcgcggcccaaagggacggatatttggttgcagacccctcggagctctcaagcacccacgattttctgaagcgatactgtctcggcaccactgggggcttactgacaggggcacctgcaagtccagatctattcaacatttacgccggggagcttatcgaccagagactggcacccagactgaaacggtggggattaacctattccagatacattgatgatctcactttttctagcaacgagccgatcggggaacgtaagaggcgcgccattcgcgacgtgatagctgccgcgggcttcgacatatcctaccggaaggcgaaagtgtacgatctggctaaaggtccagtgcagatcaatggcatcggtctggaccttacgggtaggacatatgtgccccgtaagtatcttgggaaagtaaacggaatattgcacctggccaggtacggcatgattaaacccgcaaaggttgctggctacatgggagtctattggaccgccactccaagatcacaccaggggagaaatagggccgaatgccatacgctcgagttatttcatgactatcagctgcatcggaacgactggctgatccggtcctga

SEQ ID NO: 14475 - RNA, 990 nt, synthetic construct
  source 1..990: mol_type = other RNA
atgattttcgacggcattgatttaccaaggtctggcaccaaagccgaatttaaggcctggcagaagagggacgtgaaccctctggggagaaccagccgcatgcggacactccacactccaaatgaagccatgaagtatctccacgaccgcctggtgatcaacttaagaagaattaaggcagtggatctgacttcagcagctagcaagccgggcggttctgcattgcggaatgtgctcaggcacaggcataacaggtacttctatcttacagacatctcaagcgccttcgacagtgtagattctcaccggctggctgccgttctagctggcctcgatactcaggtgcgcgaaagtgaggtctacgcctttttgcggcagttttgcatgacggagcagggagggcttatcactggcagccccagttcacctgacttgtttaatatttattgcgccgtcctgatggacggccagatgcgagagtactgtctgagacatgaggtgacctactcccggtatttggatgacctgaccttcagctccaaacaggttatcggtgcgcggaagagagagaagatccgtgagttaatctctctgtccggtctgcgcatagggcatcataaatccagggtgttggacctcaaaaagcaccggatcgagatcaacggaatcggacttgaatacggagggcgcgtatatctgccaaggtggtatctctacaagattcgaggtctgatgcacgtggctgaaagatcagaagatccaaaactgctccagagagtccacggaatgataggactacttcaggcatcgacggatgcgagtcgaccccgcaataggctggagacaaaggttttcagcgagtacgcccaactgcgtcatcagacacgaaaaaaacccttcattcctccccctcaagggcgtgctccgattggcatacaaaccggggacccttggggctcccttgacgatgatgacgatgtccccttttga

SEQ ID NO: 14476 - RNA, 1035 nt, synthetic construct
  source 1..1035: mol_type = other RNA
atgattttagaaagcttcactacaggactcccagggaaacccgcgtggcaaccgtttaggtatcgcgatgtgaaccctttgggcgggactacgaaggttaggctactgggagcccccaaccccgctatgcgccttctccaccataggctcgtcagatttctgcgcggcctgaatgtgccgatgccacacgcagtaggtgcaagacctgctggctccccagtagtcaatgttagacgacacctctacatagataatagggggcggccagctagatacaggccgaatcggtatttcctgctgtacgaccttcgccatgcctactgtaacgtcgatcctggtctgttggcgggcattatatgtcaacattgtcctgaactgaccgttcaggacggcgccgtactggacttcctcctcggatactgcttcggaccaaatcctaacaagccttaccagcttgagcttcccattggccagcggcgtcgaggagggcttgttcaaggcggccctgccagtcccgatctgtttaacctgtacgtggccatcactctcgatcagcccctaggtgagctgtgccagcgctatgggctcacatattcccgctatcttgacgacctgaccttttcttctcgcgaaagatcaatcggaacaaaaaaaagacaggtgattcggcggaagatccgtgatgcaggttttaccgtcagcgaccggaaggctaagaatttggacatccggaaggggcccctgactatcaatggggtctgcttgaacaggcagggcacgatcttctgccctcgttggtatctcagacgcatcaggaccctggtgcacgccgctagaaaaggcgctgccgtggacctggccgcattacacggaatgatgggggtgttcaccgccaccttgccaaggcgatgggagttagtggacataaacggaaggcgttcggaacggagagtgccagtgggtagactgcggattgagcagaaaacactggatgagtaccgacagctacaggcacgacagcgcaggcaaccctga

SEQ ID NO: 14477 - RNA, 1038 nt, synthetic construct
  source 1..1038: mol_type = other RNA
atgatcgataagctgacctttggaattgatatcgaaaatgccacgttcaaaatcgtcgtcattaatgataagaacaacctgtctggaactaaaaaacgccgtgtcatccacatgccttctcctgaaatgcggatcattcacaaacgcttaatacggtggatccggggacagaagcgacttgtgcccatctccgcttctgggtctagaccaggtgattccgtattcaaatcggttttcattcacaagaagacaaggaaacattcatatgtgagtaacggatacactcacattgacactatcggctggttcccccggcactttttctgcttggatattaaagacgcctttccatccgtgtcagttagcaaaatgacagaggccctgctgtttgctggcttggaccccaatgactattcatacaacaaggtaattagcatcctggagaggtactgttttactaaagaggacgggctgatagtgggggcaaatgctagtccggacctctttaatatatacgcagagtattttctcgaccgcaatctcagaaggtactgccatgagcatagcctagtctatacaagatacctggacgacctaattttcagttccaataagacgattggcaaacgcaaaaggaagagcatctataagttcattgatgaaagcggccttaaggtgaatgagaagaagacaaagatctatgatcttagaaaggggtgcgccgttataaacggcatcggcgtcaacgaaaagggacgaatgttcatccctcgtcaatacctcgacaccctgagaggttacatgaacttataccttaaggggaagatcgagttgaaatttaattggctcaggggtaaaatgaatcctctcttccagtgtcaggaacagtccgatctgctgccaaaccggaccgagggcaaggtgtttgacctcttcgaagaagtgaaggtgcgattaaaattccccataaacacctcactggatcatgacgatctggatgacctggcgtatgagaacaccgacgatttgaacttttga

SEQ ID NO: 14478 - RNA, 984 nt, synthetic construct
  source 1..984: mol_type = other RNA
atggatcgcatcctgtttaccgagagaatgctctgtaatataggcttgcagatcttgcctcatataaaggacgaagacttttacagttttcgggagaagttccaggagaagcacctccatcacttcgtggtgaatgatatcaacagcctttctggccaagaaaagcagcgtgaggtcgtgaaattatctacagaattggatctgtttcagaaagctttactctcaaggctgaaaatgcactatggtgaggttctgagaagtgagatatcgaattcccacagatccgcacttaacactattctgtgtcacaaaaaggtggatctatatcgcggagaaaagaggatttacttttccaggttctactactctatggatattcaaaacgcgttcggctgtatgacaaccgaaaaggtactggaggttctcaagggagactttcaagacgagtctctggagaagatcttaaagctcacttgctttgacctgcatcgtggcatcattacaggtgctagtgcatcatcatacctgtatttcctatactggcagaagaaaattgactccaagatttatgagttgtgccgcgaggaaggtattatctgcacaagatatgtcgacgatttcctgttctccagtgagcacaaaatcaccaaaagcttcagcaagaaagtacttaaggtgatccgcaatgccaactttgaaatcaacttccagaagacgcagttttatgacctcgggcgggaaacctttaatgtcaatggcatagttttccgaaagaaggataaccggggggctattggaatacccaaaactaggagcaggaagctgttgggaatgcttaaccaatacgaaaaagggaacatcaaaatcgcccagctggcaggcgccatgtcactcctggagaaaattagccaggtgcataatggggccttcctttctcgaacccatcagaaaatcctgagccggtacagaaagctgaaacggtga

SEQ ID NO: 14479 - RNA, 945 nt, synthetic construct
  source 1..945: mol_type = other RNA
atgatttttgacagactctgtattacagagaagcccaatgctgccttcaaaccgttcataaacaaaaaggggcggaaattgaatcggcaaaactctgacatgcgtgaagtacatagagccttcctcgccttcctgaaaatccaggacatccacatgccttccgcatacgggactggtggaaaagcaaggaacctgtggcacaggtttctgcagcacagagataaggacacaggtaaatttcagaaggaatggtacatactggacttagctgatgcctatggccatgttaatatggaaaagctggtcggcgtgatcctactcacctgcgacaatgagcttcggaggcgatcagatgatttgctagcgtttctcatgcggcattgttccagcaccagagagaaggggctcattcaaggagctacgagcagctcctttctgttcaacctgtaccttgacgaactggtggacattcctctcgagagattctgcaaagctcatggagtgacctacactaggtattacgatgacttcgcctttagtggccagaaagggacactgttaagccatcgccgtggcaagcttattaggaaaggcatacgcaaaatactgatcaaggcaggattcgagattaatcacctaaagtcgaaatgctttgatctcactaagaagccaaccaaggtgaacggcgttcttctggattattacggacggatctcactgcctaggccagtcatcaagaagatgtctgggttgctccaccgtttcgtgcacggcaagcacctgagttcttttgttgtggacgggaacttaggtagagtacaggatatccatgatatcttggagcccacctgttgcatcgaacagcgactgcttattctgtatttggagtactatcaccaccgctttcgcggtcgcgtccgaacacggcaggacgatcccttctga

SEQ ID NO: 14480 - RNA, 1098 nt, synthetic construct
  source 1..1098: mol_type = other RNA
atgcggcggatagtgatgatccagcagaaccacgctgtgctgcgaggaagccgcactgacgccgaggatgatccactacgttttgtgactatggtcggtgggtgtccccgcattgactttcattggaagcaggataccaacggaaaaaggcgccttattgggaatcctaacaaacccctccgtcggctgcaccgactctttggccaatatctagaggaagccattagcaagatgggcaaggagaattacgagctcattaaatttccctctagtaccgctttcgtcaggggtaccaatccattgaaaaatgcccagaaacaccaaaagggcaggttcttctatataacggattttgcaaatgcataccccagtgttgatttggtaagattagcggttttaatcgtgtatatcaagcgccataacgtgtacggactggagatgagcctgcggatgcttgggcagaatagagtcctcgtcagagaactgcaagaggatccgctcttcctgagtattttggcgttcctggaaagctactgctcaggccagtatggtcgaggccttgcagttgggggaccaaggtccccctacctgtttaacctgtattgtgaagtgtacgccgacgccggcttaaggaaggtgtgcgagcgctacggaattacattcacacgatacgccgacgataacgttttttctcgcgacaagcctatcacttccgacatccggcgggaactgaggaggaggatcgagtcggctgggtttcaggttaatcatcgaaaatccaaagtgctttgccgggacatgggcaccgtattcgtgacaaaggtcggtctgagagatcagaacctcgtggcaccaagatcagagtcagctaaggcggctatagtattccctaagaaaaagcgccggagactgcatgggattatcggctcttacttgcacatgcagatggactggcctgagaaagtgtccggacggatcgccgaatttctccactactatagacacgtcgagcgcaggacagcagccgaccataaaaccttcgccctgtgtaaggaattcgaacgtgagtgggctaagtatcgtaagagaagaaaatga

SEQ ID NO: 14481 - RNA, 1059 nt, synthetic construct
  source 1..1059: mol_type = other RNA
atgcgtcacgttcgcagtgccgccccacaagaacctcccgttgagaactgggatcctttgcattttgcgaccatggtgggcggacaccctcaaatccatttccactggaaggaagagggcggtaagcgcaggttgatcggcaaccctaataaacctatgcgcaagctacacgaagtctttggacagtatctccgtaaaggtatttacgcgatggggaacgataattatactctccgcagactcccgagcagcgctgccttcgttaagggctccaatcccctcaagaatgcccagaaacatattgaaggcaggtttttctacatcaccgacgtttccaatgcttatccatctattgatctggaacggttggcaatccttattgtctacatcaagaagtactacgagtacggcccgaacttttcattaagtgcattcggacaaaatgccagcttccgggaccaggtacggagagattggctgttcccacccgtgcacgctttcctggaatctttctgtagtggcatgcatgggcagggtttagcagtaggcggcccactctctccctttctgttcaacctttactgcgaagtctttatggatgcccaggtgcgcaaactgtgcgagcggtatgacatcacttacacccgatatgcggacgattgcgtcttctcacgccacaagccaataatcggggacattagacggaacgtgagggagtgtatcgccagggctgggtttgaggtgaatcaccgtaaatcaaaggtgctatccagagagatgggggcagtgttcgtcaccaaaattggtcttcgaaacagaacaggaaaagaagacgggtccgagacagccaaaattgtgttcagccagaagaagcggagaaggctgcatggaataataggaagctatctgacaatgcagatggactggcccgagaaggtgtctgggctgatcgctgagtttatccactattacaagaacgtggatgagtcgacagcaacggacaggaaaacttttgctctgtgtaagctgtttgaagccgagtgggccaaacatcgatga

SEQ ID NO: 14482 - RNA, 1041 nt, synthetic construct
  source 1..1041: mol_type = other RNA
atgagggatatgatcatgaggcctgaactagtcggacaggcctgtggagggtaccctctcataaacttcgaagtgagagacgtgaggggaaagtcccgcctgatcgggattccaaatcgtcccatgcggtcattgcatcggcaactgggcaaatttctgcgaggaatcattatgcacaccgacggcagcggctacggcttacggaagctgccgtccgcttacggttgtgtcgaagggtctaatcccctgcggaacgcatctcaacacaaggaaaatcagtatttctacatcaccgacatatctaacgcatatgggacagtgagtctcgagaggcttgccctcctgctaacatacctgattcagtacgaggcctacgaggagtctggtttttccttggcttggtttgggcaagatgaacgagtatgggtactgcgccaggacgaagcctatcagccggtcttgggtctgctggttgcgcactttggcgggcttcatggccagggcttggcaataggcggtcccctgtcgccatatctcatgaacctttattgcgaggtttacatcgatgcccccctcaggaagttctgcgaacctagagagatcacttataccaggtatgtggatgacctgaccttcagcgcaaaacatttcatcggcgaggaaaccagacgaagaatccgagccgttattagtcgggggggtttcacgctcaacaggcagaagagccgtgcccaaatgttgagtatgggccaggtgagcatcacacagattggattagctcgcgatactccagacggctcaacacgccttgtctttagccagaaaaagcggagaaaacttcacggtattattcactcctatctgactcgcggaatggattggcctgagaaggtgagaggatacgcggccgagttcctgtattactacaaaaatgtggctgtgcgcacagctaccgacgaaaagacgttcgagctctgcaaacggtttgagagagagtggaagttatacggagggccaaaacatcgtactaggtcaaagtga

SEQ ID NO: 14483 - RNA, 939 nt, synthetic construct
  source 1..939: mol_type = other RNA
atgattttcctaaaaaaggcccacgagaaaacatgtgatgaacttccactgtttttccccagactcattcgccgccagaaccagaaaacgggcgcatggaaaattcggagggtgtacgagcctaacgacgccatgcgtgcaatccacgaggaactagacgagtacctgagatcacagccacggttccctaagcatgctccaccgcgacccgcggaaaatgttgcacctcatagaggtaatcggtttttttacctgacggacattgagaacgctttcggcagtgtcaaggtggatggtctggtgaaggccttctgccttatgaattctttttggatacctaggaagcgaggcctcaaaaacttcctcgagaactactgtatcgctcctgaaggaggtctgtatcaaggagcccccagcagcccggccctttttgagctgtacgcctgggctttcctggagaggcccatacatacctggtataatctcaaaaagtggtgcgggtggaacgatgtcacatatactaggtatgttgatgacttgactttttcctccaaaaagcggatcggccgcgggactcgacgccaaatcagacgcttgttgcacaacgctgaattcaccatcaacaatggaaagaatttcgtgatcgatcttgccaatcccaagactccaagaatcaccattaccggtatagggttagagtacggagggcggatgttcgtctcacgagaaaggctgagggagctggagaaaatgttgattgcggggatcgaaggagaagacgtgaaccctcacaagattgagggctttatgtccgtattttggtcgccctatggcggcaaaagaaggagtgccgtgctcacacgcacccagagacgtatcctgtctttaagccgggcatggcgtaagctgcagaagaagaatcacacaatgaccccatga

SEQ ID NO: 14484 - RNA, 1221 nt, synthetic construct
  source 1..1221: mol_type = other RNA
atgcaccttcagttgctggtggaacaggcaagcgcaaccgagacaccgcctgcgttttctgtcgtgaggaagagggtgggtaaaaaagtacgcgccatagcagttcccaacgctagtatgagagtgttgcataggctcctgatcaatgaactggaggcaccggggtacctgttagaatctgcaacagccaaaaagggttccagcatcattcaaaatgttcggcctcacctgcatgcccggtcagtctacctcctcgatttcgctcacgcctatcgttctgtcccagtgcaaaagctggcagcctccctgcactttcggttcccaaccttcggaacggagagggaaattgctcacttcctcaaacaatattgcttcgtcccccgacacgggttagcacagggagctcccgcttcgcctctgctgtttgagttgtatgccgagtgggaggtcgatacaagtatccgccaatttctggaaagagtagaggacagcataggcggcagaatcaactacacccgctatgtggatgatctcaccttctcagccctggagccaattccagcgtgggttcgacgcggcattaggagcatctgtatgtccgctggcttctctattcagcatagaaaaagtgtggtgggcagcctgggaactaaagtcgttgaagtgactggagtgcacctacttgcccccggccgtgctatgttgtcacgggacttttgcaacactctagagcgcaccttagatacttacctgtctcagctgttctccgagcccgacctgcgcctcgaaggaatgattgtctactacgttgggatgatgcgagctctcggtgacgtgcgggcgagcaatagaagaaccgtgagaatcgataagaaaatcaaggcctacaggcttcggacaggcttcgctccatcacataagaggaagacattttctaatagaacccttgacgctatccgggcccagctacccgtgtcacagattgtctcccgcagcgttgcccttaagcgtgcagggaaggagtataaaggcctgagtcctttcaaagtagaacgaactcctagcttttttgtaaacgatcagaagggattttaccattgcttcgccagtggctcccacggggacatattcacgttcgtgatgtttagggagcagtgtggttttgtggaggccgtcgaaatgttggccaaggaagcgggggtgtccctcgactatgactga

SEQ ID NO: 14485 - RNA, 990 nt, synthetic construct
  source 1..990: mol_type = other RNA
atgcagccagctctctcttttgatattatgcccaagaggttccatcacaacccaaaccagcctgaactgttcacactgactcgagatggttccacaaaagtacgggacatctacgtgcctaccgacgaagtgcgtatgaaacacgaagccatgctccgcagattgcacgccttggagatcccgtttccccatgcccacggcggattgcctggctttggcgtgatcgataacgtccgcccgcaccaacaatcaaattatttctacaagctggacatcaagaatgccttcccaagcgtagaccacgagtggctccagcggaccgtccatgacatgctcgtcgagaggagggttcgaaaaagcgatatccgcgacatcgatcacttcgtggaagccgacgcactggttgacggttgcccaggcctaccactggggtatccagcttccccctttttgttcaacatatattgtagacccacagacttagcaattggcgcaggcctcgcgcttaggaaggactttggttaccaagtggtccgctattcccgctggttagatgatctcacattttcaagtctgcagccgattgatgcagggcatagacggattctacgtgagtgggttcatatgacccctgggtttgagattaaccacagaaagtcgcaaagacactctctcggacaggggcccgtgaccattaccggcatatcactgtaccctgatagaaggatggccccctctcccgaacttctggaaaaggtgcgagtgcagttcggccagatggccgagctgatcgctgcaggaattgagctgacgccccaggagatcggggagttcaatggataccatagtgtcctgcatatggccggggatcctcttaaaagccggagcgctactgtgaggctgttagctaaatggtacaatcggctggctcttcagctgccagacatggagagtgcggcccctggagaagatggaggttccactgactga

SEQ ID NO: 14486 - RNA, 927 nt, synthetic construct
  source 1..927: mol_type = other RNA
atgaagaggcgcacagtgttcaagcctgccactccagaagaccttcgaatacattggcggatgttggccaatctccagtcgattcagtgggaattcccccacagcgttggcagcttgcctggctcccatctgatcgataatgtgactcctcacatctccgccgagtccgagcaattctacctcttagacctgaaatcagcattcccaagcgtagacaccgatttcgccctgagagctgtgtacgatggaattcgcaccaggcgcggaagagatgaagcagccgaggcagctaggtttatggtggagacaagctatatggggcgcacacaggacgaaaaacccgacaagatgatgtatgggctcctgcagggcctaccctgttcaccactcttttttgacattatcagtcaagccctagacatgaggctgagacggcacctgcagcgcgtgtttggggatgatgtcgtgtacacccgatacatcgacgatcttacattcagtagtaggcgggcggctttcacccggagaaggaggaaagacatcgttgctcagatcgagacgttacctggctatattgtgaaccatgataagactagatgccaatccctcggaaggggcaccctgactgtcactggtctggacatgagacggaacagaaaatggcccaccgatcgacgtgtactggtggccccgtctggctcacagttagcgtccgtcgaacaggagatcaacgagatgacgagaaagttgcgcgaagacttgccaataacactttctgagaaggcacacttttatgggatgggaagcattctgcacatggctggtgacccctctaaatcaccgatgagcagtgttcgaaccctgaagcgtcggttccgggaggtcgataaagaactcaagaagcttccttctggacgtctgttttga

SEQ ID NO: 14487 - RNA, 1284 nt, synthetic construct
  source 1..1284: mol_type = other RNA
atgatcgcgctgaagagtctggttcccctacctctattcggcggggctcccacttttaacccccagaatatcttcgacggaaagaagtggcggacggtgcaagccccaaataacgtgatgcgaaaactccataaggaactcattgaagtgctcctcgaactccctatcgatttcacttctgccactgggagtctgcctggtaagagcaatatcttgaacgctaatgtgcacgccggtaaccagttcttctacattttcgatatgaaggatgcttttcctagcgtcccaattgatcgccttgcagacaccctgcatgtctgctcccacggccacttaggaaccagagctagaatccggtcttttctcgaggactactgtgctggaccccgaggattggccgttggcgcacctgcttctccccttctgttcaacatctattgcgccgtcggggtggatccggggattaggaagctgctgagatcagataccatctatacccgatacgtggatgacctggtaatcagcagtagccgcccgatacccaggattctgcgcaagagaattaggaaagtcgttaccgacgctggctttgctatcaaagaccccaagtccaaagtgctcgacaaagaaaagggccccgtgactatcacaggggtggttatcgataaaaaaggacgaattgcacccacaaaagaatgtctggcagaggtcgaggaccttctgtggataccaccacaggaactgaccccagaacagcagaaacgcatagcggggttcgccagctacttgcaatcctttcgggagtttgggcggcaaaaattggccgagggcaatggcacagtatcaacagccccattgtccccagtgctggataccttagccaaaaggtgcagaattcgcctgcgtgagaacaagaagcctagaactcagaagcagcagatgcacctggtgtttcctgaagtgtttattgacgaaatacgggcaaccgcctcgcttagagacgtgatcgagccgtatctaaggccaggtaagaggggactccgcttgaaaaaggtcggcggtgagtgggcaggcttatgccctttccataacgagaaaacaccttctttcacaatcgccgaggagaagggcttctttcattgttttgggtgtggaaatcacggttcagttatagacttcattatgcgtgtagagaggctcgagtttccagacgcagtccggttcctggcgaagaaatatgatcttcccctgccggaacgtaagcttgagcggacgaagaattga

SEQ ID NO: 14488 - RNA, 1260 nt, synthetic construct
  source 1..1260: mol_type = other RNA
atggccgcaccccggctgtcatgttctctgaaaaagtacggatttaattccaaggaagtggttgttaaggtcaacgggaaaaaattgttggcggacctcatgaactggccagagaagaaaattgaacaggctattacaagacgtagtcggtattacctcgttaaaaaaatcgacaaagacgggtccatacgaaagacgtacgctcccgatcgtgagctgaagaagctgcagaagaggttcctaaaatactttctgtatcggatccctgtgggctggaagaacttgataaccgggttcaggcctggttgctcgtacgtgtataacgcaaagtgtcacgctttagccgatgccaagatcgtgctgcgcctggactttgccaatgcgtttcccactgtcgagacaagctacttgaaaacgattctggccaagattctgagccaggaagtggagtatcatcgaaagggagactatcctttccatcctctattccctgtgaaaagagtgaaatggttcaggagagcgattaaaaattactaccagcttgacctcttctgtgatccagacaagatcatatgcgagtttctcgatcttgtgttatccttcgtcacctatcagggaagacttccacagggggctccaaccagcccgtacctttttaatatcgtactttggtacagtggcctcatccaaaagatcactgcatttttaggcgagaaacgcatatctgtcagtgttggcaacgttttttctggagaggtgatcttcacagcatatgctgacgacttgaccatatcttcctcccgtagcatcaccaaacatgaggtgaacaatctgattgatctgatcgaacaagaatcaccattcaggatcaatcgcgagaaaatttgctactttcaagccgatagaatcgcccctctggtgacaggactccgcctcgtgaagttagtcaaggaagggcgggagctcgatgtcctgatgagcaaagcaaacctcaacagcagggagaagaagaatctgaagcgcaagattctgaatcgcgaaggccggtggattgtaaactctgtatccctaccgaaaaaaggtatccgaaaaattagaggtctgattcacaaggctacttacgcccccccactcattcagcggatgctggaacagaagatcaagggtcacctgagttgccttaaggccatctatggcgataagttgcccaaccaaatatcaaagccctatcagaaattccagcagtcactgaggggctga

SEQ ID NO: 14489 - RNA, 1170 nt, synthetic construct
  source 1..1170: mol_type = other RNA
atgatctcaaaagaccttctgactagcgtgcttgactggcccgaggaaaagattaacaaagcggtgctatttaaggacagctatcgattgatcaaccggaagaagaaggatggcagtctgcgaaaaatttatgcacctcatccagatttgaaaaggtttcaacgccgtttcctgaagtattttctgtatcggattcctctcatttcttcccttcctatcaatgggttccgtcccaaattctcctatatcgataacaccaaagagcacgcccagaaaaacgtgcggtttgtgttacgactcgatttccgggatgcctttccatcagtgaagatcgagtacttaagaatcatccttaagaaggtcttattcctggaagtaaaggggtacatggagaaaaactataggcaaagacctctgttccccaataaaagagtccagtggttcagaaaactgctgcgggacttaccacagctcaacctgttctctgtcgaccctttgaaaatccttgacgaatttgtggagttgattctaccccttattacataccaaggcaaattgccacagggcgcctctactagcccctgtctcctcaacattgttctgtgctactctggactcctggaaaagatttatcaatttctctgggacaacaggattcttttctccgagaatgacgtttcaatggtgaatagtacaatctacgctgatgacctcacgatctcctctagcgagcccatttcaaggagcagcataaatcagctgatcgatttgatcgagcaggagagtccatttaagattaataggcagaagatctcgtactttaacagagctcgcattgcaccgctcgtaactggactgaggatagtcagattggtgaaggaagagatagaactggaaaacttcctgtccaataaggacctgacctataagcagaagaagaatattctgcgtcgcaccctcaacaagaaaggcaaatggatcatcacctccgtcagcctgcctaagaaacagatccgccggatacgcggactgatataccgcgccatcagtgaaaaagctctggccccaatcatagatggtcacatggctaatctaaaagcaatatacgggcagaacctacccaatcagatcatggttccgtacaagaagtacctgattacagagggttga

SEQ ID NO: 14490 - RNA, 1212 nt, synthetic construct
  source 1..1212: mol_type = other RNA
atgagtcggatcaaaattgagggaggtgatacgctacttgccggggttttgggcatgccatcggccgacattagaaatgccatagtatgccgcgacaactataagattaagcacattgtgaagaagagcggcgggaggagaaggctgagcataccgtgcaaatccgttaagaagtttcagaagctattcctcaaaaagttcctgtattgtctgatcgaacggggcgtactggacaagaatatgaccggctttcttcccggggtaagtgtcaaggacaatgcgttagttcatctgaacgaaaacctccagtatgtggtgcgcctggactttaaaaatgctttcccctcagtgtcattccgggtggtcaaagaggtgctcctgcaccatgtgaagaacgaaatcggcacatacagggccgtggagattcaacgtctgttaggtaaaaagattaactaccccgagcctgtcctttttagcatgcgcaaagttaaatggttcagagagctggtcagttcactgtcagtcgataactctgcatcttactacctcgactacatcgtggatggattcatagagatggccgcatacctattgacttataaaggcaagctccctcaaggggccccaacctctccatttatgttgaatttgaccgtctcctatctcaaaatccttgataggattcgggagttcctcaaacagaacaacatcgactcccaagtgagcatctacgctgatgacatcgtgattagcgcaaaggaaagaataaacttcggtctgatcaggggactcattggggttgtcgaagcttccagggtgttcagaatcaatcgagcaaagattctccgctttgatattaatcagacagctcccctgataaccggcttccggcttatccgaatcagatctgttaacagaaaactgactgaaagctggcttgctcgcttgcctcggaaaatcaaggccacagtggaggaacgtttattttacaatccccagagtccttttataaatatcactttgccccagaagcagatcaaaaaaattaggggaatcatccatcgagccatctatcaaccaggactggcatccaaggtaaatggttacgtcgcgtacctgaaagacatttatggggagcacctgcctcgccagattgtggaaccgtataagaagtacctgctggtgaaccagaaggatccagaggtggtctga

SEQ ID NO: 14491 - RNA, 1044 nt, synthetic construct
  source 1..1044: mol_type = other RNA
atgaatacaattcaggagaaggccattatcgtcctctcatcactgctgtctaacaaattctctccagagaagatcaaagagatcctaacaagtggcattagctatagatacaaacctcgcaagaaaaaggacgggtccatacgcgattgctacgctccagccgaggatctgaaagccctgcagcagagcatcctctccgaaatcctgcacaatatacccgtgcacaagaacttatgtgggttcgtacccggggtcgcaatgaagaacggcgtggaagctcatctccgggagacgagagagaagaagattgtcggaagatggatcgtgaaagtggacattaagaactgctttccaagtgtaaagatcaaggtcttgaaaaacatgttcgaagatatcttcactggaacactgtatgcatatggggtggataatccagctgtgttttttgaattctgcgacatacttatcaagttgaccacacacaagggtggccttatccagggcgcaccgacctcaccttatctcaccaacttagttatttcctgggcgggaattgtagatgacctcgagcactactgtaatacacgccatggctacgatctgatctttagcatttacgccgacgacatcaccgttagccccaccatcaccaataaagcgagcgtcaaaaagataatccacgccattgagaaaagtaggattttcagggtgaaccctaagaagactactcagaatgacaatcgacataggagccatagaatcactggtatgtcaatccaccaggagtttgaccaattcggaccgtctgaagcctggactacgctgtcccggaaaaaacaaaagttttatcggggccgaatacagaaggtgattcaattcctacagcagggatgtgaaccttcgatcaaagagcacggcgtgtctattaaccaggctcgtgggtacattacctggacaaggcatgtttgtggtgaacggataccctcctgcctgaaaaaagtgatcgcagtgtttgaagagcttgttaataagcaagccttgtga

SEQ ID NO: 14492 - RNA, 1101 nt, synthetic construct
  source 1..1101: mol_type = other RNA
atgaaaaatagcaagtactacctgtcattgttcctgaagtttctcccaattcttgagaagatgaaaattacttctgctatggctgatggactcatttacacttattataccaaggagccgtactatcgcacctacgagattcttgaaaagaatgggaagatccgtaaaatcgacgaaccttgtgatgctctcaaattgatacagcaggagctgaatcgctacttttataggttccccactcacaaatccctgaaggcttatattgagaactgcgaaggcgcaaaagagacagccctgactcatcagttcactgtgtggggggccaaacccggcgatagacaatctaaaccacctagatggttgcttaaaatggacctgaaagactttttcccctcaataaagacaagaacagtggagaacgttctgttcctcaattttttaagggacaaggataatcagcaactgctgatccgtctttccgaaaagctgaacaagaagttcgggttgctgttcaagcaatttattgagcttctcatatggctgaccgcagggaacggatgcctcacacagggtgcccccacctccccatatctagcgaatctagtatggaccgaaagcggtgtgatcgagaagattcttgactacctccacagccggaagaaggaatttaatttagcaatctacgccgacgatatctcggtcagtttcctcgaacgaaagtacccacgcggagtgattaaaaacattgccaagatcatcaatgacagtgagtacttcaaaataaaccctaagaaaaccaagctgaaccggctgaaacatggcgcccacctggtggtgggtattagcataggcaagacatctcactttgaaccttcctttggcatcccacagaagtttattaacacactgcgaggcgaactacacaagaccattaccatcataaaaacggagacgcggcctatcgagcagatccatgaggttagcatccccatgatgagagggaaaatcggatgggtcaagagtgtctatggagatcggaggttgccgtcaaaaattaagaaactggtagaggaattcgaaatcttatctaggatcatctga

SEQ ID NO: 14493 - RNA, 1278 nt, synthetic construct
  source 1..1278: mol_type = other RNA
atggcgaggccaacggccctcgatgtgctgtcagcactgataggcctggataggcaaatcatcgaacttgcactgtcagagactgaaagctaccagaaaattgaaattccaaaacggaacaatggacggcgcatcatccacatcccaagcgaaattctagctctggtccaaaaatacttgctcgagtgcctgtattcctgggaggtccatgactacatgcacggatgtgtgataggaagaagtccagtgagcaacgcggccaaacatctgcgcctcaataagaaagagaatgtccgtccaggcactggcgaacagttcctgtatatgaccgtgcctaggcacgttctcaagctcgacctcagcaatgctttccacgcagtgactaaggacgccgtccaccagatgttaacatctgccttatctagcacatgggcggccaatctccacttgaagcaaggcgacacggatgtagagaaaaagagatgggatattatcaaccacgtaaggtctaacggctattttgtggagcccttggccagcctaattacccagctgaccaccaccgagggccttttaccgcagggagcggccacttcaccctatctcctgaacatggtcatatgcgcttcgggccttatggagcgcgtggcaaaagcctgtaagccgcggagaggacggttcacagtgtacgtggacgacattactattagtaccaaggagcctgaaattggtgaagggttcatcgccgctatgatcgaagccgttgagcgaggggggcggtttacggtgaatcccaaaaagaccagtcttacagattctagacaccgcgctcctgtaatcactggcgtgacattgggtaccaatgcagacgggactggtcgtcttagtatagaacaatcccatctgaacaccatcagacgcattctgtggtgtgctgccaacctgttagagcaggggatcaagcccgactttgatgaacacggattttccttggaccatgctctgggccatgccgcatgggtggataatgtttaccaggacaaagccccccatccactggtcgctaagcctctggcacgattcaggaaggcatttctctgccgagccctcggacctttggggacacaactgtccctgccctttggtgaggaacagcctaagcaggggctaagatcctcaaacaggcggcagctgctgcaggagctgttggatcagcttcttgaccgccccgttgaggagagaatcagggctatagatgagttcaacacacagcattga

SEQ ID NO: 14494 - RNA, 1032 nt, synthetic construct
  source 1..1032: mol_type = other RNA
atgcagaagtctcggaaggatgctgtagagattttggccaacttgatgagactgcaatccgatttcatattcgacgctctaaagaaccggaactaccaacaaatcctaatcccgaagcgtagcggggatgttcgcaaactccacgccccaggggaagaactgaagcttgtgcaggaggtcatcttacagttcctctacagatggaaggtggacgccagacagttcggattcgtgctgggcggctctcctatccggaatgccaaatatcatattaggaacgagttctatgtccctcactgggtcctgaaactcgaccttgaaaatgcattcccttcagttacatcgacagtgcttaggaaggagtacacacgagttttcaaccccgagacatttaaagaactgagcggcatcgatgaaaaacagtttaccgcctttattcagctcatgctggatctgactacatatcgcgagagattgccacaggggagtccctgcagcccctacctgctcaatctggttctcgtgtggacgggggtcaccaagggtgtgctggaatattgtgaaaaaaaaggcctcagagcttcattgtatggagacgattttactatctctgcaaagacctcaaacatgtggttctccaaaacctttttcaggaagattaacagtgcggtcagtcgaagcggttgtctgcggttaaatcacgataagacccatctgatctgctcccgcaactctgctcctataattactggcgtgaaaatcactgagtcccacgacaatggcgcaaagctgaccttgacccaaagcactttaaatcactggcgaggggtgattcatcgcgtcacggagatactgtactggaacaatcggcttccacggctagaacaggacggagtgacatttaatcaggccctgggttacgtgaactggattgaggacgtatacagggagtcagaggtacccctttctgtgagaaagccaatcaagtcctttaaagtgcagagcagtaggtttgacaggcgtcgcggatga

SEQ ID NO: 14495 - RNA, 1200 nt, synthetic construct
  source 1..1200: mol_type = other RNA
atgtcccgtaagcaggatgaggtgaagataaaaaacccctttccagctcagccattgttacagcccagaaccctcacaaagatctacaaagagcggagagacgaaatggacgccctggatttcttaggccacatcgtcaaggatcgtcagactatccaggaggcctggcgaattcgcagagagtacaaggatgtgtatgtgctaaagggcaacggagaagtccggatcctgtcagtcccgcctatcaaggttaaaaaggcacagaagatgatactcgagtggttgcgcgacgggaattttatatcctcccacccacgcatccacggcttagtggggagtagctgtttcaactttatcaaaggccactgtgggacctcgcaatatttctacagctttgacataaaacacgcttatgacagtactcctgtgcctctcatctatgaaaaccttctgaggattttgagtaacaaagagtcgctgctgctccgcgcatacttcgaatctgagacgggaaaggggatccaggaactagccaaaaccattatcgagttgactacctactcccaagcgtcacctaaacgaacagaaaacgagaagcagctttccttcctgaaaaggggctccaactcaattctgccccaaggtgcgcctacaagccccgcactcttcttcgttgtgcttaagacaatgatggagaagattgaacgtgatgtaaacttgagcgaacataaactgagctgttatggggacaatttcctgatttcttctcccagtccaattaatcccgaggtagccgaccatgttcttgctatcgtgaaatcatttgggtttaccccccataaaacctttcagcataatattaagcagggcgccctgaaaatctgtggatataccatcgccccaggtaatggtggtaaggataaaacgcgaatcggaattgacaaaagcaccattcggaggatacgcgccctgtgctgcaaggcacaatacactacacgctacaaggatccgcggctctacagaaggctacagggctgcctggcttggattactccagtctatggaggaaatcggcacaatctgccaaatcagatcaagaagcctcttagaaagattggcacacctctgaagtgccagtctaaacagagcaagaggtctttcctgctcaagaaacaaaggcccaagaaaagacgggcttga

SEQ ID NO: 14496 - RNA, 1047 nt, synthetic construct
  source 1..1047: mol_type = other RNA
atgaggcagacacggatagatgaatggtttagcgagacgaagcagaagaagaagctcatcgctaaaattcaaaaggtgtccgccttaaccaagaccaggcccgagtcattttgggaaaagttggagaaagccctgcctctacgaaaagactacagagaggctaaaatccctaagagatctggtggatatagaaccatctacatgccttctccagagctgaaaaaggtacagaaaaatatcctccgctatctgcaggaaatatggcaagtacattatggaccggtgcacggtttatcccccggtggcagctgcgtgaagcatgcacgcatacacagcgcctcgcggtggatttttcagttcgatataaaaaacgcgttcccatctacaaacattataaccctgcggaaactactctcacagatcatccccgtggaggtgaatctcggcgagaacgccactaagattgcctacactcgggctgagcttatcattaagcttaccacttttcaggaaggcctgcctcagggggcacccactagtcctttcttgttctacatcgtgctgacatctaggaagattattccagctacaactgggggcgaaattagacttaccgggctgttctataaactgtggtccgcgtgtccccgaggctacaagatttcctgctacgtcgacggcttcgttatatcagggcccaagcccatcagccctaaaacccaggaaaaaatcttcaaaacgatccgaaaggagagtttcgaaatcaatcagaagaagacacgcattcaggactgccgccacggaaccgttatgatctgtgggctggccgtcgacggaaaagggcgtattagtctccctaagaagacgattcgtaagtggcggggcatcatcggaaaagcaagatttgatccggagaacttggaattgaggcaaaagattgagggctttgtcgcaagcctgaaaccaatctacgaaaaaggaaccccaccgcagatcacaaagccatataataggtatcaacgcgagctggttaaaactacatcctga

SEQ ID NO: 14497 - RNA, 1101 nt, synthetic construct
  source 1..1101: mol_type = other RNA
atgaaaaagttttcctcctttgatggtctgttgtctctcctcgaggactgtagacaatgcgaaatcaagtaccggatcaaaaagatgcctaaaaaaggcgggagcaagcggattatccacgtgccctccaaggaggtaaaagaaattcaatgggagatactggacatcgttaaagcctggcaggtggatgaatgccagtttggcttcagtccaggcaagtcctgtgtcgataacgccctcttccacatccatggctatgatatcaatgcctctggtcgaaagattcaaatcaggggagttcccaggtgggtgctgaaaacggacatcgaggacgctttcccaagcgtgaaacgaaagcatctggagacactgtttcgtgacctatttctgcccctaaaatcctaccctgcatttgtcagcgcgacttcacccgacagggtcgacaagatttacaagaagctggtgtatcagttcgctagactggccacctttaaggggcgcatgcctcaggggagtccttgctcaccctatttattcaatctcgtcttacttcagagcggcatcgtgaaaaagctgaaggataaagcaggagagcgggccaaaaagacaaagggttgtcaggttactgcttataaaatcagcttctacggtgacgatataaccgtgacctcttttaaggaccgcataccaaaccgcttcattaaggagatatcagccattgttgaagaaggcgggattttccggcttaacaatgagaaaacacagagatcttcaaaaaagtaccgatcgatcctcattaatggcatcaccttgaatgataaatggaaggaaggaggaccgtgcttcttgggattgagtaaaaagatacgtaagacctacagggggaagattcacagagtgacagtgatcttagatagcgggcgccttccagaacttgagattgacggcattaacctggagaaagctatgggaatcatttctcggataaaggacgtgtatagaaacgaaagtctgccttccgatctcgagcgcgtactgatcaagttccaggaggcaagaaataacctgatcaggaggactatcaacatcgtctgtatttga

SEQ ID NO: 14498 - RNA, 1251 nt, synthetic construct
  source 1..1251: mol_type = other RNA
atgtggatttcacaggacctgatcgaaaaaaccaaggaagccctgtatgagaaaactaaggatgagagggtgctatgggctagccccttggaaattgtgtgccttgccaagcaaaagaagtgtaaggttgactttaacacgcttctgagatcgttcagcgcgaatcactgcacggcagaggacgtggcaaatctgttcaattatctcaatagtcatggggaggggaatgtggagcgtgaaatgctccttaaggtcatagctgagccagaggagaggaaagtcctgcaggaagtgaagtgtctgatcgacagatactatccaaagcgaaagaagaaccccttagaggggataccgaaaattaaacagtttgtgaccaggttccggaacaaagagcgtcactacagatcttttgccattccaaagaggaatggcggacgccgcatcattgaagcacctactcaggaattggccaacatccaaagattgattctgaaaaagatcctctatcggaaccagatctggaactccaacagtagcgtgcatgggttcgtccctggacgcaatatcctctcaaacgcgagtcttcataaagaggcaaccgttatcgtcagaatcgatcttaaagacgcctttaggaataccaaggaagagatgttggtgaagcacctaaaggagtactttactgaaaaaggcgctaagatcctagtgcgcttatgcacatacaaaggacatctccctcagggggcccctagctcaggcatgctcctgaatttcgtactgggagaactggatggtaagctgaaaaaaattgccgggttcatgggctggcgttacagtagatacgccgatgatttaactttctcctgtgtggaattcaataaacacacagtaggcattggcaagctcatagaaagagtgaaatctatgatcaaagactactcatatcgggtcaatgaagagaaaatccgggttttcaaaaaaaatcgcgccatgcgagtgacaggcctcgtactgaactctggtaagcccaccatcagccggaagtttaggcggaacgtcagggctaaggttcacaactttgttaccaagggtattggaaacgagaaggaggtgctgggatatatttcctatatcaacctggcgaacaagaaatacgctaaaaagctgttgcgaatgatggagaagctgccctccacacacgtaccacgccaggatgctataggcataagctccggtgtcgcatctgagtga

SEQ ID NO: 14499 - RNA, 195 nt, unidentified
  source 1..195: mol_type = other RNA; note = Related to NC_015164.1; note = Phocaeicola salanitronis
gctgaaacggaattttgaatttcgtccggcgtatttgcccggatgtctccttgttcttcggaatcatggagataaacaatgttagtacgttaacgtattgcactgtagtacgttgtacttttactatattattatgatgatattttatatgttgtatattatattttatattacataaagaaaagacatttcagc

SEQ ID NO: 14500 - RNA, 182 nt, unidentified
  source 1..182: mol_type = other RNA; note = Related to JAFSKF010000035.1; note = Bacteroidales bacterium
actgaaacggcattttgaatttcgtccggcgtatttgccggatgtctcctcgttcttcggaatcttggagataaacaatgttagtacgttaacgtgttgcactgtagtacgttgtacttttactatattgttattatgctattttatatgttatatattacataaagaaaagaagtttcagc

SEQ ID NO: 14501 - RNA, 191 nt, unidentified
  source 1..191: mol_type = other RNA; note = Related to JAFZXH010000011.1; note = Bacteroidaceae bacterium
actgaagcggcattttgaatttcgtccggcgtatttgtccggatgtctccatgttcttcggaatcctggagataaacaatgttagtgcgtcaacgtgttgcactgtagtacgttgtactttttactatattgttatcatgctattttatctattgtatgttgtacattacataaagaaaagaagtttcagc

SEQ ID NO: 14502 - RNA, 191 nt, unidentified
  source 1..191: mol_type = other RNA; note = Related to NZ_KQ957209.1; note = Prevotella corporis
actgaaacggtattttgaaattcgtccggcgtatttgaccggatgtctccttgttcctcggaatcttggagataaacaatgttagtacgttaacgtgttgcactgtagtacgttgtacttttactattattgttatatgtagtttttctatgttatatgttctatattacataaagaaaagatgtttcggt

SEQ ID NO: 14503 - RNA, 186 nt, unidentified
  source 1..186: mol_type = other RNA; note = Related to JAFWZP010000094.1; note = Bacteroidales bacterium
gctaaaatagcattttgaattttgtccagcgtatttgtctggatgtttcctcgttcttcggaatcttggaaataaacaaagttagtatgttaatgtgtacactggaatgtgttatacttttactattgttattatgatattttctattttgtattttttaattacataaagaaaagaaattttggc

SEQ ID NO: 14504 - RNA, 179 nt, unidentified
  source 1..179: mol_type = other RNA; note = Related to JAFSTV010000046.1; note = Bacteroidales bacterium
gttgaaacggcattttgattctgtccagcgtattcgcgggatgtctttgttcgccttaggcgtgacgaagataacaatgtcatttcgtaaactagtcttggaagagactttcttattatgattaatgactatattttattattttttattctttttacataaagaaaagaagttttagc

SEQ ID NO: 14505 - RNA, 225 nt, unidentified
  source 1..225: mol_type = other RNA; note = Related to VVZB01000003.1; note = Phocaeicola dorei
accgagatgtcatttgatttttgtccagcgtggtgcaaaccctgctctcgcaagagagtggattcgcgggatatctcttcgcttgccgaggagacgataatgttagtacgttaacgtgataacactgtagtacgatgtactttctattattcatattttatgactttatatatttatattgtctattattattttattctttacataaagaaaggacgttttggt

SEQ ID NO: 14506 - RNA, 227 nt, unidentified
  source 1..227: mol_type = other RNA; note = Related to NZ_JADNRM010000003.1; note = Phocaeicola sp.
gccaaaatgttatttgactttttgtccggcgtggtgcaaaccctattttcgcaagagaatagattcgctggatatctcttcgcttgacggggagacgataatgttagtacgttaacgtgataacactttatacgatgtactttctattttttttgtttttatgttttatgactttatatatttatattgtctattattttttttacataaagaaaagacgttttggt

SEQ ID NO: 14507 - RNA, 207 nt, unidentified
  source 1..207: mol_type = other RNA; note = Related to BK014950.1; note = Myoviridae sp.
actgaaacatcatttgaacttttgttcggcgtggtgcaaaccctactcttgaaagagagtagattcgctggatatctcctcgcttgccgaggggacggcaatgttagtacgttaacgtgataacactgtattttctattatttatattatttgaatttatagtatttatagtattgtagtttttacataaagaaaagacgttttggt

SEQ ID NO: 14508 - RNA, 205 nt, unidentified
  source 1..205: mol_type = other RNA; note = Related to JAFWQO010000014.1; note = Prevotella sp.
tctgaatcggcattttgaatttcgtccggcgtggcttcagccctgctctttcgggagtagattcgctggatgtctccctgctcttcggagtatgcaggagataacaatgtcaggcagttaacgtgatactgatgtacttacgtactgtttctattatttattatggtatttattttattattacataaagaaaagaagtttcaga

SEQ ID NO: 14509 - RNA, 192 nt, unidentified
  source 1..192: mol_type = other RNA; note = Related to FNHC01000010.1; note = Prevotella bryantii
actggaactacattttgaacttcgtcctgcgtattcgcaagatgtctcattgtccttcgggactttgagataaacaatgtcattacgttaacgtatacactaggcatacacagtatgctgttcttgttatgttatgatgtatttatgttatatattatatgttatatttacataaagaaaatcgtttcaggt

SEQ ID NO: 14510 - RNA, 190 nt, unidentified
  source 1..190: mol_type = other RNA; note = Related to NZ_JNLA01000055.1; note = Bacteroides sp.
tctggaactacattttgaactttgtcctgcgtattcgcaagatgtctcactgccctttgaggctctgagataaacaatgtcatcatgttaacgtgtacactatacatacatggtatgtttttattgtagatgttatgatgttattatcttagattctatgttatacttacataaagaaaatcgtttcaga

SEQ ID NO: 14511 - RNA, 213 nt, unidentified
  source 1..213: mol_type = other RNA; note = Related to JAGBTN010000007.1; note = Bacteroidaceae bacterium
ctggaattacattttgaaccttcgtccagcgtggcataagccctgccttatcaggtagattcgcaggatgtcttcttgttctaaggaacctgaagataaacaatgttatcacgttaacgttgatacttgacatactatgtatgtttttattgtttttatgttatatattatttatcatatttagtgtatttacataaagaaaagacattccaa

SEQ ID NO: 14512 - RNA, 173 nt, unidentified
  source 1..173: mol_type = other RNA; note = Related to FR901644.1; note = Prevotella sp.
agtggacataaatttgaactcgtccgatgtattcgtcggatgtcacctgtcttagtactggtgataaacaatgttatagagtaaacgttgaaaacttgtatgttgtcaattgttttattgtatttattgtatatttttatgttgtatatttacataaagaaatgaactccgct

SEQ ID NO: 14513 - RNA, 203 nt, unidentified
  source 1..203: mol_type = other RNA; note = Related to JAGAGC010000402.1; note = Aeriscardovia sp.
actgaaactacattttgaatacgtcctgcgcattcgcaagatgtcttccaacccttcggggttgtgaagataaacaatgttactcggttaacgtgaaacttgaagtacgttgtacttatttctatattattgatataaatagccatccatatatcttaatagccatttatatcatgccgttagataaggaaaatacttttggt

SEQ ID NO: 14514 - RNA, 203 nt, unidentified
  source 1..203: mol_type = other RNA; note = Related to NZ_JACJJF010000108.1; note = Bacteroides gallinaceum
ctgaaactacattttgaacttcgtcttgcgtggcgtaagccctgctctttcgggagtggattcgcgggatgtcttcttgctcatctgggcttgaagataacaatgtctgtccgtgaaagctaacattgtttatggcactaactccatcttagattttgatatacttatatagatggatttacataaagaaaagaacgtttcag

SEQ ID NO: 14515 - RNA, 203 nt, unidentified
  source 1..203: mol_type = other RNA; note = Related to DVLS01000070.1; note = Candidatus Avibacteroides faecavium
gccgggatacattttgaactttcgtcctgcgtggcctcgtgccctgcccctcggggtggattcgcgggatgtcccctcgccctctggggcttggggatgacaatgtctgattgtcattagttttacctcatttaaataactttaaaaagttgtatttagaggtatctagagttatttcatacataaagaaaagacgttccggc

SEQ ID NO: 14516 - RNA, 217 nt, unidentified
  source 1..217: mol_type = other RNA; note = Related to NZ_JACICA010000001.1; note = Alloprevotella rava
ggcagacataaatttgaattcgtcttgcgggtgaaagccatgctttcttttaagaaggtatattcgcatgatgtctcattatctttcgggatatagagataacaatgttatcacgttaacgtagacttgcacatacgttgtatgtgctttctattgtgttatgttgtttttatatttaatagtcttattttcttatataaagaaatgaatgtctgtc

SEQ ID NO: 14517 - RNA, 209 nt, unidentified
  source 1..209: mol_type = other RNA; note = Related to JXQI01000021.1; note = Prevotella sp.
gacagatataaatttgaaaacgtcttgcgggcgaaagccctgtctctttggagacagattcgcatgatgtctcatcgtctttacggccggtgggataatgttatcacgttaacgtagacttcacatacgtagtatgtcttctactcgtgtcttattgttttatatttgtattcttattttattattatataaagaaatgaaagtctgtc

SEQ ID NO: 14518 - RNA, 209 nt, unidentified
  source 1..209: mol_type = other RNA; note = Related to HF986315.1; note = Bacteroides sp.
gacaggtataaatttgaacacgtcttgcgggcgcaagccatatttccccggagatacattcgcaagatgtctctaggctttttcaaagccctgagatgacaacgtcatcatgttaacgtagactgtgcatacgcagtatgcctttctatcctgtattgttgtattgtttttatagtattattccttatataaagaaatcaactcctgtc

SEQ ID NO: 14519 - RNA, 206 nt, unidentified
  source 1..206: mol_type = other RNA; note = Related to JAFULJ010000027.1; note = Muribaculaceae bacterium
aactgaactaaaatttgattcaagtcttgcgtattcagcatgacggcttcttctgcagaagaagtaacccaatgttatttggttaacggcgggcttgagtagacaagtctactaatttataaatttataatcaactcaagacttcaatcttaagacttataaatttaagactaacatattaattataaaagaaattatgttcagtt

SEQ ID NO: 14520 - RNA, 234 nt, unidentified
  source 1..234: mol_type = other RNA; note = Related to JAFRQB010000001.1; note = Prevotella sp.
actgaaatggcattttgaattatgtcttgcgtggtacaagccctacttcttaagaggtagattcgcaagatatcttcagtctcctcggagttctgaagagaaacaatgtctccatgttaacgttacactatttcgtacgtagtacattgttattgttttgtcgaacaagccttttattcataaaaggtattgtttttatctattcatacttatacaaagaaaagacatttcagt

SEQ ID NO: 14521 - RNA, 223 nt, unidentified
  source 1..223: mol_type = other RNA; note = Related to JAFQZK010000038.1; note = Muribaculaceae bacterium
gctgaaaagccattttgaactttgtcctgcgcattcgcgggatgtccataattccctttgggagttgtggataacaatgttaggcgtgttaacgttcaactgcgtttcactgatgtactgcgtacattgtattatttttagtgattatgatcattatgattatttagatcattatgattatttagatcattgctatattttctgaaagaaaaggctttttagt

SEQ ID NO: 14522 - RNA, 185 nt, unidentified
  source 1..185: mol_type = other RNA; note = Related to JAFXWY010000545.1; note = Bacteroidales bacterium
acctgaaacgatattttgatttcgtcctgcgtattcgcaagatgtccttacgcttccgaaaggaagtaaagggataacaatgttattcggtaatcggatcagcattcatatctatttttatatttatatctgtatcggtatttatatctatacatttatatattattaaggaaaatttgtttcgt

SEQ ID NO: 14523 - RNA, 216 nt, unidentified
  source 1..216: mol_type = other RNA; note = Related to RKEV01000037.1; note = Prevotella sp.
agcggatataaatttgattccgtcatgcgtggtgaaagccctggctcttcggaggcagattcgtatgatgtctctttgactcgtaagaggctttgagataacaatgttatatcgtcaacgtagactgtagacatacgcagtatgtcctttctatcgtataatgttgtatatattaatgtttatatgtagttttatataaagaaatgatgctccgca

SEQ ID NO: 14524 - RNA, 176 nt, unidentified
  source 1..176: mol_type = other RNA; note = Related to JAFXTE010000053.1; note = Bacteroidales bacterium
accgaaaatgtattttgaaaccgtccggcgtggctttgccctgcagtagcagattcgcgggatgtcccattctatgaatagggatactaatgttagaatgttatcgtatgattcgtatattcgtatatcgtgatcgtgtgactatattgttgtaaataaagaaaagcagtttcggt

SEQ ID NO: 14525 - RNA, 237 nt, unidentified
  source 1..237: mol_type = other RNA; note = Related to NZ_KV793777.1; note = Porphyromonas sp.
agggacataaatttgacttcgtcctgcgggcttaggccgcacctctccggaggtgtattcgcaagatgtctcagactcccctcggggatatgagatagccaatgtttgatcgtgacgatctattttcatatccacgagagaacatccttatttaggggttagatatcctctttcatgatctatttagatgagggtattttattttccgctcacatacataaagaaatgagtgtcctc

SEQ ID NO: 14526 - RNA, 225 nt, unidentified
  source 1..225: mol_type = other RNA; note = Related to JAEUGO010000081.1; note = Muribaculaceae bacterium
gtcgaagcagacattttgaaaatgcccgacgaattgccgggtacttctccctccggggagacttccaatggtcaattggcttctgtgcgattaccgtgtctacttgcggtgcagtggctcctcatccgacaagtcaatcgctttgaatgtacagatttaacaatcaatgattatgaaatctgtattatgaaggtcttacagacataaagaaaacaacgcttcggc

SEQ ID NO: 14527 - RNA, 225 nt, unidentified
  source 1..225: mol_type = other RNA; note = Related to RIBI01000006.1; note = Muribaculaceae bacterium Isolate-102 (HZI)
atcgatgcagacattttgaaaatgcccgacgaattgccgggtacttctcccctcggggggacttccaatggtcaattggcttctatgcgattaccgtgtctacttgcggtgcagtggctcctcatccgacaagttaatcgcgatgaatgtacagatttaacaatcaatgattatgaaatctgtatcatgaaggtctcataagacattagaaaactacgcatcgac

SEQ ID NO: 14528 - RNA, 225 nt, unidentified
  source 1..225: mol_type = other RNA; note = Related to BK020991.1; note = Siphoviridae sp.
gacgaagcagacattttgaacatgcccgacgaattgccgggtatttctccctcggggagatctccaatggtcaattggcttctatgcgattaccgtgtctccttgcggtgcagtggctcctcatccgacaagttaatcgccttgaatgtacagatttaacaatcaatgattatgaaatctgtattatgaaggtcttaaaagacataaagaaaactacgtttcggt

SEQ ID NO: 14529 - RNA, 221 nt, unidentified
  source 1..221: mol_type = other RNA; note = Related to JAGAST010000027.1; note = Muribaculaceae bacterium
gctgaagcagacatttgaacttgcccgacgaattgccgggtactttcccgaaagggaatttccaatggtcaattggcttcctgctgttaacttgcctccttgcggtgcagtggctcctcatacagcaatttagcagccaagaatatcagatttaataataagataattatgaaatctgaaaattgaaggtcttacaagacataaagaaacgaagcttcagc

SEQ ID NO: 14530 - RNA, 201 nt, unidentified
  source 1..201: mol_type = other RNA; note = Related to VULT01000011.1; note = Sodaliphilus pleomorphus
ggctaaagaaacattttgaacctgcccggcgattggtcgggtactttcccctcggggaatttccaacggtcagttggctctgggcacttatcacatcatcaagctgatgtgatagtgcgtatgaatctgggaaaattacaccctcctatgtcatagagttaatttctcagccaaagcgaaacaaagaaaatagtcttggcc

SEQ ID NO: 14531 - RNA, 219 nt, unidentified
  source 1..219: mol_type = other RNA; note = Related to JAAVDT010000061.1; note = Bacteroides sp.
agtcaaggggacattttgaaattgcccgacgatttgtcgggtactttccccacggggaatttccaacgttctgttggctcctgcgcacttatcgcatctacttgcggtgcagtggctcctcatccgatgagataagtgcccatgaatctgggatgataagatttatgatattatagtcaattactcagacttagggacataaagaaaacagccttggct

SEQ ID NO: 14532 - RNA, 222 nt, unidentified
  source 1..222: mol_type = other RNA; note = Related to JAAVCQ010000011.1; note = Bacteroides sp.
agtcaaggggacattttgaacttgctcgacgatttgtcgggtactttcccctcggggaatttccaacgttctgttggctcctacgcacttctcgcatctacttgcggtgcagtggctcctcatccgatgagataagtgccgatgaatctgggaagatgataagatttataatcttatagccaattactcagacttagggacataaagaaaacaaccttggct

SEQ ID NO: 14533 - RNA, 172 nt, unidentified
  source 1..172: mol_type = other RNA; note = Related to NZ_CP007034.1; note = Barnesiella viscericola
tcttaatgaaatgaatttgattcccgcctggcgtttagttcaggtgtcctaagcgaaagcttttggatatacaatgttagagttgtaattgtttcactattttgtcataatttgacgggtgatatttttttaagtatatagtgtacataaataaagaaataagtagttaagg

SEQ ID NO: 14534 - RNA, 173 nt, unidentified
  source 1..173: mol_type = other RNA; note = Related to NPIZ01000015.1; note = Prevotella sp.
cttgacgaaataaatttgactaccgcctggcgtttagttcaggtgtcctgagcgaaagcttttggatatacaatgttagagttgtaattgtttcactgttttagtcatattatgttatatgatgtgattatagtattatgtagtgtacatatataaagaaataagtagttggg

SEQ ID NO: 14535 - RNA, 174 nt, unidentified
  source 1..174: mol_type = other RNA; note = Related to JAFRTY010000007.1; note = Bacteroidaceae bacterium
cctaactaaatgaatttgactttcgcctgacgtttcgctcaggtgtccatagcgaaagcttttggatatgcaacgttagagttgtaattgtttcactatattttacaagatgtgttatgtagtattttatagtattatgtatattgtacatatataaagaaatgaatagttagc

SEQ ID NO: 14536 - RNA, 172 nt, unidentified
  source 1..172: mol_type = other RNA; note = Related to JAFXXQ010000016.1; note = Bacteroidaceae bacterium
cctgacttaatgaatttgacttccgcctgacgtttagttcaggtgtccagagcgaaagcttttggatatacaatgttagagttgtaattgtttcactgaattattcatgtgttgtactttgttattgtgttattatgtatattatgcatatataaagaaatgaaaagtcagc

SEQ ID NO: 14537 - RNA, 173 nt, unidentified
  source 1..173: mol_type = other RNA; note = Related to JABZTC010000018.1; note = Prevotella nanceiensis
tttggtacataaatttgatttagcctaacgttttgtttaggtgtccattgcgcaagctttggataagcaatgtcagggcagtaattgttttactattttttaacattgtgaaagtattatgatattgtttatattattgtatttttacataaataaagaaataaagtacctaa

SEQ ID NO: 14538 - RNA, 159 nt, unidentified
  source 1..159: mol_type = other RNA; note = Related to JABVZU010000003.1; note = Phocaeicola sartorii
atgaaatagaaattttgaattagtccggcgtatttgtccggatgtccccaccttggtagggaaaacaaggtttatttgtcattctccgcgtgctccgtgtaccttgaacgttttgcgtgctccgggggcgtgggcatatacaaagaaaatgaattttat

SEQ ID NO: 14539 - RNA, 242 nt, unidentified
  source 1..242: mol_type = other RNA; note = Related to JAFXAS010000015.1; note = Alistipes sp.
attgaaatgacattttgatttaggttcgcgtattgcgtaaccagcccgacgaaggtaacttcacagggttaagcaaggttttgctgtcataattatatcctgacatcgagctgtcagtgctataattttttagtaaatctatattgcatatagattagaacttatttgagttttaataaagatatagatgagaataatattaagtttaatattattcatagacaaagaaaagagatttcaat

SEQ ID NO: 14540 - RNA, 325 nt, unidentified
  source 1..325: mol_type = other RNA; note = Related to JAFTUI010000023.1; note = Proposed Tidjanibacter sp.
attgaaatgacattttgatttaggctgtcgtattgtacagctggcccaaaggaggtaacttcaatgggtaaaccaaggtcttgttgttattggacttttgaccgacagttcctgtctgttaaaagtcaagtattctcaataaattgagaacatattaacttaagaagttaatattaaataacaacatatcccttcttcgaagtgatatgggtgatattcaagtctgaacttgaatatcattaagcaaaatactccgtattttgcgtcaagtgagaataattaaactgcgtttacttattcatagacaaagaaaagaaatttcaat

SEQ ID NO: 14541 - RNA, 212 nt, unidentified
  source 1..212: mol_type = other RNA; note = Related to JAFNYI010000087.1; note = Alistipes sp.
attgaaacgacattttgacttaggttgtcgtgttgtacaaccgactcttggacccgtctaagagtaaacaaatggcttactgtaattcgtattttgacaatgctcgggcattgcacaaaatacaagtactcttcgagtatctcctacaaccatttatgtttcgtttatttgagaatagttcctattcatagacaaagaaaatatgtttcgat

SEQ ID NO: 14542 - RNA, 164 nt, unidentified
  source 1..164: mol_type = other RNA; note = Related to JAFUSZ010000030.1; note = Bacteroidaceae bacterium
acaaaaccaattttgaaactgtctgccgtattcagcagattcctcttgctttgcaggaggtggcaatgtttgatcgttataggagttactgctctatattgacgtgcaaatgatgcatattgacatgcaaatgattcttcatatacaaagaaaagcggttttgt

SEQ ID NO: 14543 - RNA, 186 nt, unidentified
  source 1..186: mol_type = other RNA; note = Related to SUYG01000053.1; note = Prevotella sp.
acagaactgattttgaaattgtctaccgtattcagtagattcctcttgcatatgcttgaggtaacaatgttagattgttatatgtgcttgacgtgcaaagcatacttctgctttccttcgaggcttacaaatttaaatacaaacagtatgttatgtgctatgatatacaaagaaaagcagttctgt

SEQ ID NO: 14544 - RNA, 148 nt, unidentified
  source 1..148: mol_type = other RNA; note = Related to SUWU01000046.1; note = Lentimicrobiaceae bacterium
actgggagagcattttgaatttgttagatgtattcgtctaatatcaaaacaatgttgctattgttatttgaaactagtctttgaaactagtctatagaatattataattgctaaatctaggagcatgtttgaagaaaagaatctcagt

SEQ ID NO: 14545 - RNA, 149 nt, unidentified
  source 1..149: mol_type = other RNA; note = Related to JAFUDU010000007.1; note = Prevotella sp.
atgtgagacaaattttgactaccgtccggcgtatttgtccggatgtccctctcaagagggataggttcgtatcattgtcattccgtttaccgtgttcgctggcgttctcgttctgcgttctcgtgtatatacaaagaaaatcctcatgt

SEQ ID NO: 14546 - RNA, 234 nt, unidentified
  source 1..234: mol_type = other RNA; note = Related to JAFRXO010000051.1; note = Bacteroidales bacterium
actggaggagacttttgactttgtccgtcatatttgacggatgtcccgaaagaagggataagagaatgtttgtgcgttacttgcaacaaagtccgatctccctagatcgtctttgtttcatattgagtaaactcaatatattctattttagccggtcataaatgaccggtcgccctacttcccctcctttgtcgattccgacaaagggtgtacacaaagaaaacgatctccagt

SEQ ID NO: 14547 - RNA, 237 nt, unidentified
  source 1..237: mol_type = other RNA; note = Related to JAFQZW010000007.1; note = Bacteroidales bacterium
accgaagcaaacttttgactttcgtctgtcatgtttgacagatgtccgtaaaatcggatactctaaaggtttactcgttactaggaagtgaaatcgcacatagtgctattccacttcagaaatgtgcaaagcacataaagtaaagcctaaacccttcaaattctagactaattaaattattagtcgacagagtcgacgatcgaacaaagttcgtagacaaagaaaacaaacttcggt

SEQ ID NO: 14548 - RNA, 205 nt, unidentified
  source 1..205: mol_type = other RNA; note = Related to JAFZZI010000013.1; note = Bacteroidaceae bacterium
accggagcggacttttgactttcgtctgtcacgtttgacagatgtccgtaaaatcggatacttccaaaggtttactcgttactcgagaagttttacttctccacatatgtgcaagcacatatgagtgatgagatctaaggaatatagttggaactatattccgggactctgacgagtccgtagacaaagaaaaaaacgctccggt

SEQ ID NO: 14549 - RNA, 220 nt, unidentified
  source 1..220: mol_type = other RNA; note = Related to JAFSJL010000028.1; note = Paludibacteraceae bacterium
accagagcaaacttttgattttcgtctgtcatgtttgacagatgtccgtaaaatcggatacttgaaaggtttgtatgttaccctgaagagcaacgacttacagtcctttctcttcataagatgtgcttcgcacattattatggcatattgagatcttagtatattgagactctgtatcccgaactctgcgagtccgtaaacaaagaaaacaagctctggt

SEQ ID NO: 14550 - RNA, 223 nt, unidentified
  source 1..223: mol_type = other RNA; note = Related to JAFUYF010000001.1; note = Bacteroidales bacterium
accggagcagacttttgacttcccgtccgtcatgcttgacggatgtccgggcaaccggacaacacaaaggtttacgcgttactggtcacaagccctgaaatcggagatttcacttcttgtgacttataatgtgacaagcacatttgtggttatatgtgttttattctattgcacgcaatagatcggaatctcgattccgtagacaaagaaaacgacctccggt

SEQ ID NO: 14551 - RNA, 230 nt, unidentified
  source 1..230: mol_type = other RNA; note = Related to JAFZME010000158.1; note = Bacteroidales bacterium
accggagcaaacttttgacttttgcccgtcacgattgacaggtgtccgggaaaccggacaacaccaatgtcgccgcgttacatcgatactgcgcttcaatctgcgatttcgcacagtatcaccatatgtgccttgcacattgagtgtatttatggctgtttagcgctaaggggcgctcaacagcgcagtctcttcgagcctgcattaatacaaagaaaacgaactccggt

SEQ ID NO: 14552 - RNA, 255 nt, unidentified
  source 1..255: mol_type = other RNA; note = Related to JAFUDT010000010.1; note = Bacteroidales bacterium
accgtagcaaacttttgattccagtctgtcatgcttgacagacagtccgggcaaccggataatcctaagggttttgcgttacagcacataactctgtcatcgtgccgatgccatcattctgtgcgattataattatctgaacgagttcagataattgaattaaaagtggaacttttaataggattgtaattgaaaaaaaacgtagtaatcctcttcgagtattactgtgtgtaaacaaagaaaacgaactacggc

SEQ ID NO: 14553 - RNA, 228 nt, unidentified
  source 1..228: mol_type = other RNA; note = Related to JAFYYM010000038.1; note = Bacteroidales bacterium
accggaacaaacttttgacttttgtctgtcatgtttgacagatgtccggctttcgccggaaaaaccaaagggttctgcgttacttcgccacaacgctgcactgcgttccgcattctggcggaatatgtgagcgatgctcacattgtgtggtgatgtatttacggatatagagattctctctctatcccgttctctgaagagaacgtatacaaagaaaacgagtccggt

SEQ ID NO: 14554 - RNA, 202 nt, unidentified
  source 1..202: mol_type = other RNA; note = Related to JAAYJQ010000010.1; note = Bacteroidales bacterium
atcggcctatgcttttgattcccgtccgtcatgtttgactgacttgcctgggcgaccaggcgttcaaaggtccattcgttactcggtgactgcgtcacgtcatattgcttcgcaattgagaaaaatggaactgttgtattattttctaaaaggattggcggaaagacttcgtcattccgtacacaaggaaaacagcgccggt

SEQ ID NO: 14555 - RNA, 234 nt, unidentified; identical to SEQ ID NO: 14546
  source 1..234: mol_type = other RNA; note = Related to JAFRXO010000051.1; note = Bacteroidales bacterium

SEQ ID NO: 14556 - RNA, 207 nt, unidentified
  source 1..207: mol_type = other RNA; note = Related to JAFYOT010000249.1; note = Bacteroidales bacterium
cctgaatcagattttgatcttccgtctgttgtattcgacagatatccaggtccgcctggatgagtaatgttatagcgtaacagtttcatctgaagctgaaacaatatatatattactatgtaatgaatataatattacacaatattatatattatttcagattaaacggtaacaagttacctgtacacaaagaaaagacgattcagg

SEQ ID NO: 14557 - RNA, 172 nt, unidentified
  source 1..172: mol_type = other RNA; note = Related to JAGBVU010000006.1; note = Bacteroidales bacterium
actagaataggattttgaatagccgtctgtcgtattcgatagatatccagtatactggatgaaaaatgtatcttcgtaatatgttgtatatatactttgtatgacattacatgtagtatgatatgttaaacggtaacaagttacctatacacaaagaaaagagaattctagt

SEQ ID NO: 14558 - RNA, 155 nt, unidentified
  source 1..155: mol_type = other RNA; note = Related to JAFZIR010000019.1; note = Bacteroidales bacterium
tctgaaatggcattttgaaaactgtctggcgtcttgccagatttccaggtcaaactggaaaagcaatgttagtgcgttattgttttaaggtgtttggatgagtttggatgttattatagtgatatatggcatatacaaagaaaacgaatttcaga

SEQ ID NO: 14559 - RNA, 183 nt, unidentified
  source 1..183: mol_type = other RNA; note = Related to NZ_CP091788.1; note = Prevotella sp.
acaggaatgaacttttgacttgtagcccgtcgtatttgacaggtggcctggtagcaatactgggtaagaacaatgttagattgttattatttcatatctgtgtgagtttttactagaacgacaagtagaagtagacaagaacacagacaagattttcatatacaaagaaaacgaagttcctga

SEQ ID NO: 14560 - RNA, 168 nt, unidentified
  source 1..168: mol_type = other RNA; note = Related to JAFRRT010000017.1; note = Muribaculaceae bacterium
atgtgaaacaaattttgaattctggtccgatgctactgtcggatgtcattcttctaaaaaaagaattgataaaccaaggttatattttattacagtctttgactgatttgtagagaacctcattttaaactgttcaagattacaaaaacaaagaaaaagagttcgcat

SEQ ID NO: 14561 - RNA, 161 nt, unidentified
  source 1..161: mol_type = other RNA; note = Related to JAGCXD010000267.1; note = Paludibacteraceae bacterium
atgcaaaacaaattttgaattctggtccgatgctatcgtcggatgtcattcttctaaaaaaagaattgataaaccaaggttatattttattacagtctttgactgatttgttgtgtatatagtgcactcattacaacaaacacaaagaaaaacgtttgcat

SEQ ID NO: 14562 - RNA, 173 nt, unidentified
  source 1..173: mol_type = other RNA; note = Related to JAGCXD010000191.1; note = Paludibacteraceae bacterium
gttggcagaaaaattttgactctggctcgatggtatcgtcgagtgtcattcttctaaaaaaagaattgataaatcaatgttatattttattacagtcatagactgatttatagctgtgatattcgtgttattacctatatctctttataaatacaaagaaaatatatgccatt

SEQ ID NO: 14563 - RNA, 166 nt, unidentified
  source 1..166: mol_type = other RNA; note = Related to FR900399.1; note = Prevotella sp.
aatgctacacaaattttgattctggtccgacgtgcgtcggatgtcattcttctaaaaaaagaattgataaaccaacgttttatttaattacagtcgtacgactgatttggcttaattcaaatataaagtcaatagtataaagtacacaaagaaaattaatagcatt

SEQ ID NO: 14564 - RNA, 165 nt, unidentified
  source 1..165: mol_type = other RNA; note = Related to JAFPVK010000006.1; note = Bacteroidales bacterium
gtaagcaacaaaatttgactcttgtccgatgctcttcgtcggatgtcattctcctaaaaaaagaattgacaaactcaatgttttgttttaatactgacaagtcagttatattccgtatatacttatattatggaccaacacaatacaaagaaatgagatgctttc

SEQ ID NO: 14565 - RNA, 160 nt, unidentified
  source 1..160: mol_type = other RNA; note = Related to JAFZLC010000057.1; note = Paludibacteraceae bacterium
acggaagaaacgaattttgactcttgtccgatgatatcgtcggatgtcattcttaaaaaagaattgacaaatcaatgttagatttcatctgtgatgaacttatagaattattcactacagaataaaaacgtttaaatacaaagaaaatagtaacttccgt

SEQ ID NO: 14566 - RNA, 180 nt, unidentified
  source 1..180: mol_type = other RNA; note = Related to JAAVFW010000009.1; note = Bacteroidales bacterium
gccaaacaaattttgattctcgtccgacgtgtgtcggatgtcattctttcaaaaaaagaatgataaaaacgttatattttattacagtcaaaagactgatttattattgtaaatgaatttaaaagatcaaaatctaattaattcagatagcaaaaataaaacaaagaaaagagtattggc

SEQ ID NO: 14567 - RNA, 173 nt, unidentified
  source 1..173: mol_type = other RNA; note = Related to JAAVDW010000016.1; note = Bacteroides sp.
gccaaacaaattttgacttccgtccgacgtgtgtcggatgtcattcttttaaaaaaaaagaatgtaaacccaacggtatattttattacagtcatagactgatttattatgtcttgatcttaatgatatttcataaagaagataataataaaaacaaagaaaagagaactggc

SEQ ID NO: 14568 - RNA, 175 nt, unidentified
  source 1..175: mol_type = other RNA; note = Related to JAAVCY010000011.1; note = Bacteroides sp.
gccaaacaaattttgactcccgtccgacgtgtgtcggatgtcattcttataaaaaaagaatgataacccaacggtatatttttgttacagtcatggactgatttatgcttaataacttagtgatttaaatttaaacttagccttaagacataaaaacaaagaaaaggatattgac

SEQ ID NO: 14569 - RNA, 166 nt, unidentified
  source 1..166: mol_type = other RNA; note = Related to MNQI01000006.1; note = Bacteroidales bacterium 43_36
agccaaacaaattttgactcgcgtccgacgtgtgtcggatgtcattctttcaaaaaaaagaatgataacccaagggtatattttattacagtcgtagactgatttattctttatgaatgttaatttcaaaaagacaagaatagaaacaaagaaaagagtattggct

SEQ ID NO: 14570 - RNA, 183 nt, unidentified
  source 1..183: mol_type = other RNA; note = Related to JAAVFD010000014.1; note = Barnesiella sp.
accaaacaaattttgactctagtccgacgtgtgtcggatgtcattcttttttaaagaatgataacccaacggtatatttttttacagtctttgactgatttattgatttttataataattattaaaattattgatttttctaattactttcaaaaatcttaaaacaaagaaaagagtattggc

SEQ ID NO: 14571 - RNA, 173 nt, unidentified
  source 1..173: mol_type = other RNA; note = Related to JAFUKZ010000065.1; note = Muribaculaceae bacterium
gtacaaacaaattttgacttttgtccgattgttttgtcggatgtctttcttttaaaaaaaagaaagataaccaaatggtatatttaatttacagtcgttggactgatttggtgtaatttcattttctcatgcacaacgaagaaaggaaaaatacaaagaaaaggaatttgtat

SEQ ID NO: 14572 - RNA, 165 nt, unidentified
  source 1..165: mol_type = other RNA; note = Related to JAFYUK010000058.1; note = Muribaculaceae bacterium
acacaacaaattttgatttatgtccgattgttttgtcggatatctttctttcaaaaaaaggaaggataacctaatggtatattttatttacagtccagtggactgatttgtatttctcaatcacaatgaagaaaggaataaaacacaaagaaaaggaatttgtat

SEQ ID NO: 14573 - RNA, 200 nt, unidentified
  source 1..200: mol_type = other RNA; note = Related to JAAVBM010000118.1; note = unidentified bacterium
aaccgatcaaacttttgacttttgcccgccgttgctctactactttagtgggctaagatcttccgatcgaggcgggtgttccaatttaaggcactgttccggatgtgcccaaaaaaggaataaatcaatgtcgtagattgatcttcgatcttaaaagatgattgtaacatctctataaacacaaagaaaagccatcggtt

SEQ ID NO: 14574 - RNA, 164 nt, unidentified
  source 1..164: mol_type = other RNA; note = Related to JABUTH010000081.1; note = Veillonella sp.
ctctcagccaaactttgaccctgtctgctgttactggcagatgccacatgtaaatgatggcaaataacaatgttatatcggtttttcgtaccgaattgttatattatgataatttaaaagataagttgttatctgatatcaacacaaagaaagcaagctgagag

SEQ ID NO: 14575 - RNA, 228 nt, unidentified; identical to SEQ ID NO: 14553
  source 1..228: mol_type = other RNA; note = Related to JAFYYM010000038.1; note = Bacteroidales bacterium

SEQ ID NO: 14576 - RNA, 232 nt, unidentified
  source 1..232: mol_type = other RNA; note = Related to JACXTV010000190.1; note = Campylobacterales bacterium
atccataaatattgaatgatatgctgtattcggcataagccccaaacttttaaagttactgggttaatgttttaagttaattttaaaaactaaaaactaaagaataaaatgtgtatcgtacattgggttaacgttttaacttaattttgataactaaaaacgaaagaataaatgtattcaatgcatcatgcacaatgaatatattgccatacacaatgaatagattatggat

SEQ ID NO: 14577 - RNA, 191 nt, unidentified
  source 1..191: mol_type = other RNA; note = Related to NZ_KE387264.1; note = Chryseobacterium gregarium
gtttgcacgaaattttgattttgccagttgttataaatttttatttataattatatgattggtctgttttagatgaaagtctagaactgaatgttattttaagttattcttactagatttactatttaactgtttttactatatttttctaattttaattttatctcataaacaaagaaaatattgcagac

SEQ ID NO: 14578 - RNA, 219 nt, unidentified
  source 1..219: mol_type = other RNA; note = Related to NZ_BMKD01000001.1; note = Mucilaginibacter rubeus
gctcatcaaaattttgaaatatgtctgctgttcggctatggtcgaaaaatcggcaggcagttatctgtaaggcatagcttttccgataactgaaagtgaacactgtaattttatacaggttacacttatttacctgatagtttataaattatatgctttccagccataccattatacgggtgattcggtgttgcatacacaaagaaaaagatggtgagc

SEQ ID NO: 14579 - RNA, 241 nt, unidentified
  source 1..241: mol_type = other RNA; note = Related to NZ_QMDV01000006.1; note = Pontibacter arcticus
gcctgctctaagattttgatttatgccagctgtcgcgtaggagcaatcctacgtgaaaatcggctggtaccctgtagcaatatggggtgaaagttagaatcgtcattgtatcagtctgcattgacatttactagctttttgagtccacttatcatgacttatattttatatttattatataggatttataagctgttttaagtagattgttaaatcataaacaaagaaaatacgagcaggc

SEQ ID NO: 14580 - RNA, 248 nt, unidentified
  source 1..248: mol_type = other RNA; note = Related to NZ_LVWA01000005.1; note = Pontibacter flavimaris
gcctgctctaagattttgatttttgccagctgtcatgcaggagcaatcctgtgtgaaaatcggctggtgtcccatagcaatatgggatgaaagcaacaatttggtcattgtagaccagttttgttgttaaagttgaggcccagtctgttatacattttgttatccactcttgtataccagttatgctgtttttttccccctcattctttttttcgagtttctcataaacaaagaaaacacgagcaggc

SEQ ID NO: 14581 - RNA, 239 nt, unidentified
  source 1..239: mol_type = other RNA; note = Related to NZ_LRML01000007.1; note = Rufibacter roseus
gcctgctctaagattttgatttttgccaactgtcgtggcggagaaatccaaaacgaaaatcggttggtgtcccgcagccatgcgggatgaaggtttaagtgtcatttgtctgttactagatgactgtcatttagattttattattgattatttatgatttatatgttattatgagatatgagtcgtctttaatcaacttctttgacttaaggtcataaacaaagaaaacaagagcaggc

SEQ ID NO: 14582 - RNA, 188 nt, unidentified
  source 1..188: mol_type = other RNA; note = Related to PPEG02000007.1; note = Chryseobacterium viscerum
gaccgcttaagattttgatttcgcctgctgtattcggttggcagtcccaaagtaactttggggctaaaagttagatagttatttctctttacgatttttgactattactattttttatatattttatatttaatttatgttatgatttttcttgaaatgatttcataaacaaagaaaatacagcgggc

SEQ ID NO: 14583 - RNA, 188 nt, unidentified
  source 1..188: mol_type = other RNA; note = Related to NZ_JPRO01000006.1; note = Chryseobacterium luteum
gaccgcttaagattttgatttcgcctgctgtattcggttggctgtctcaaaagtaattttggggctaaaagttagatagttatttctctttacgatttttgactattacgatttttatatattttatatttaatttatgtcatgatttttcctgaaatgatttcataaacaaagaaaatacagcgggc

SEQ ID NO: 14584 - RNA, 210 nt, Flavobacterium sp.
  source 1..210: mol_type = other RNA; note = Related to QJQY01000044.1; note = Flavobacterium collinsii
atccgcttaagattttgatttcgcctgctgtactcggttggctgtctcagaattaattttgaggctaaaagttagatagttatttttctctgtgattttaattactttggttttatctattttttcattttattttttttctattttgtctttattttatttttttatttatattttaagggtttcataaacaaagaaaacacagcggac

SEQ ID NO: 14585 - RNA, 196 nt, Flavobacterium sp.
  source 1..196: mol_type = other RNA; note = Related to NZ_VAHC01000003.1
atccgcttaagattttgatttcgcctgctgtactcggttggcagtctcagaattatttttgaggctaaaagttagatagttattttttctatgatttttaattactcttggttttatctattttttttattttgtctttattttatttttatattaatattttaagggtttcataaacaaagaaaacacagcggac

SEQ ID NO: 14586 - RNA, 217 nt, unidentified
  source 1..217: mol_type = other RNA; note = Related to MTQF01000001.1; note = Flexibacter sp.
gtccgctgaagattttgattttgccaactgtttattatgtaagtaataaaaaaccggttggatggttttcaggattaatcctgaaaactgaatgtattattggtcattcctggccatatgtgctttttatgccttcaagttattatttttaattgcttttattctattaatatatttataatttttctgggccatacacaaagaaaacaaagcggac

SEQ ID NO: 14587 - RNA, 246 nt, Flavobacterium sp.
  source 1..246: mol_type = other RNA; note = Related to NZ_OU957226.1
accgtagtgaaatattgaaatgtctatcgcaagataggcttgcctgctggaaatattatttttaatattttaaattggctggtagtttcagagtaatctggaactgaatgttagtgatgtgattttaggaacattgatacaatgttgtttcaaaaccctcaccttttttgataaattatttctttaattattttagattttaatttatgatctttggatacatagagaaagaataacaactacggt

SEQ ID NO: 14588 - RNA, 242 nt, Flavobacterium sp.
  source 1..242: mol_type = other RNA; note = Related to JABSNN010000002.1
accgtagtgaaaatattgaattgcctagtgaaaactaggcttgccaactggaaaaagtactcgtacgttttcaaatcggttggtggttgtagagcaatctataactgaatgttagtgatgtaatttttgggatagtaaaccttctctcaaaaccctcacttatatgttgattatgaattttatgttttattattttaattttaatttaatgaagatacatacataaagaatactactacggt

SEQ ID NO: 14589 - RNA, 217 nt, unidentified
  source 1..217: mol_type = other RNA; note = Related to NZ_CP060695.1; note = Polaribacter pectinis
accgtagtataaaaaattgattacctgtttaggcaggtgttctgctgtattcggcagtaggttgcagtttactgtaactaaatgttattatcgttattgtattgaagttaagtcttcttatagtaatatttttttatatttttttaagtattatttttttaattatttataattattaatttattacaattcataaagaaagaattgatgctgcggt

SEQ ID NO: 14590 - RNA, 225 nt, unidentified
  source 1..225: mol_type = other RNA; note = Related to NZ_SLUP01000001.1; note = Mariniflexile fucanivorans
accgtagttaaaaaattgaattgcctgcttcggcaggtagtctgctgtattcggcagatggttgcagtttactgcaactaaatgttagagatgttattgtaacctagttcaaaaccctcactttttttagtttttaatattttattattatttattttaatagtgaaatctactttcaaagctatttaatttttaaagtcatagagaaagaattaaagctacggt

SEQ ID NO: 14591 - RNA, 233 nt, unidentified
  source 1..233: mol_type = other RNA; note = Related to NZ_CP019333.1; note = Gilvibacter sp.
actgaagtcactgtattgacccgcctgccttcgggcaggtattctgctgtattcggcagaatgttgtagccatgctacaactgaatgttagaggagttattttgactgatttcttttaagaaaccacaaaaacaaccctcactttttattgctatgatttttattatcatggtaagtcatggcaaggctatttttagcatatggagccatagataaagagtatatacttcagt

SEQ ID NO: 14592 - RNA, 212 nt, unidentified
  source 1..212: mol_type = other RNA; note = Related to NZ_JAFIDN010000022.1; note = Proposed Natronogracilivirgula saccharolytica
gcccacacaagatattgaaactgcacgctgtattcggcgtgtctgtccggcgttaagtgttgcaacacttgccgggctgaatgtcagtacttgatttgcaggtagatcaggtaaggttatactttacatgagatacatgtgaatagggactattgactgtatactattattattaatgatagttcattcatacataaagaatatcagtgggc

SEQ ID NO: 14593 - RNA, 185 nt, unidentified
  source 1..185: mol_type = other RNA; note = Related to SEFL01001225.1; note = Sphingobacteriales bacterium
gcagatagcctgggggcttgctcccaggcgaaatgttctaaatgtaatttttttagcgcttttattatttttcgctatagaacttgaaactattgaacattattaattatttattatttatcgatattagctattgcagttattagagattgatagttttcatacacaaagaataaggggcgggc

SEQ ID NO: 14594 - RNA, 203 nt, unidentified
  source 1..203: mol_type = other RNA; note = Related to NZ_BDCW01000118.1; note = Tenacibaculum ovolyticum
acctgctgtacaatattgattttgccaactggaaattatttttttaaaatttcaatgatcggttggtgttccgaatttattcggaatgaatgttatttttgttaaatatctttttgaagttattattagaatgatctatttcttaaattattctttttaatattctttaaataattcctaaattaaagaataaaacagcaggt

SEQ ID NO: 14595 - RNA, 266 nt, unidentified
  source 1..266: mol_type = other RNA; note = Related to NZ_JHZZ01000001.1; note = Polaribacter sp.
acctgctgtaaaatattgatttttgccaactggtaattaaacttttaagttttgtttcaacgatcggttggtatctcagtaattatccgacaaccggaatttcggatactgagatgaatgttatttaaggttattgtgttagccttttagagtaacttttataaattattcttttaagatatatttttattattatttcttttaagatatatttttaaattattttttaagtaatttattcataaacaaagagtatagcagcaggt

SEQ ID NO: 14596 - RNA, 198 nt, unidentified
  source 1..198: mol_type = other RNA; note = Related to NC_015510.1; note = Haliscomenobacter hydrossis
gcctgtctaaagatattgatcgtgcatgctgtatttcggcatgtctcctggcttttagccaggtgaacgttttgaggtcattgttgaagatgattggtcatctgcttgtttattgtgatgataaataatgatggttgatttgtttttgatgatgatatggttgaattttactccatacgaaagagtatcatggcaggc

SEQ ID NO: 14597 - RNA, 212 nt, unidentified
  source 1..212: mol_type = other RNA; note = Related to JACJYR010000001.1; note = Lewinellaceae bacterium
gcctgcctgaaagatattgaacgtgcatgctgtatttcggcatgtcttcccggttcccgggatgaatgttagcgttgtcattgtcagtattgtgctttctattgtcattttcatttttatgaaatgatgatgtgattgatgatattgctgatgatgaatgagtgctgttattgcagttctcatggttcatacgaaagagtatcacggcaggc

SEQ ID NO: 14598 - RNA, 216 nt, unidentified
  source 1..216: mol_type = other RNA; note = Related to NZ_JAAORA010000001.1; note = Candidatus Chlorobium masyuteum
gcctgccgcaagatattgactagtgccagctggggttaatcgaaagatgtatccagatcggctggtgtcccgaagcaattcgggatgaaggttcccgggttattagttggatctcagattgtaatgatttttttttacgatttgatttctacctactaaaccccgtatctaatttgaattcttttcaaagtcatacacgaagaatatgcggcaggt

SEQ ID NO: 14599 - RNA, 246 nt, unidentified
  source 1..246: mol_type = other RNA; note = Related to JADJUM010000002.1; note = Saprospiraceae bacterium
gtctgatgtacaagatattgattagtgccatctggaaaaggtcgaaaggtttttcaaatcggatggtgtttcaggttcgcctgaaatgaatgtatctatataattgattcgtcgaaagttgaaatttgtcgatctaacgatagctttttaataattcgtgaattaaattattgataattatttattttgaatttatgtatatataaatgtatgtaaatatcataaacaaagagtatgacatcagac

SEQ ID NO: 14600 - RNA, 200 nt, unidentified
  source 1..200: mol_type = other RNA; note = Related to JACJZT010000003.1; note = Flavobacteriales bacterium
gcctgttgtaagatattgatttttgccaactggaaattatcgtaaggtagtatcagatcggttggtgtcttcaaggtaacttgaggatgaatgtttaaaagtaattactctagcaatttacttctggtaatgcttaacttaaaattattaacctttaatttttaatacaagttccataaacaaagagtatagcaacgggc

SEQ ID NO: 14601 - RNA, 179 nt, unidentified
  source 1..179: mol_type = other RNA; note = Related to SEAO01000392.1; note = Chryseobacterium sp.
acctgttaacaaatattgaatttgctagacggactggtggtaacgccaatcataatgagctagtggttaagacgtgtgttttaactgaatgtctatggaatattcccatcagaacaccttatactttaatcagttttatgaaattgatattgttacatatacaaagaatagagacaggc

SEQ ID NO: 14602 - RNA, 187 nt, unidentified
  source 1..187: mol_type = other RNA; note = Related to NZ_JAFVME010000001.1; note = Pedobacter sp.
gcctgctgaaatgtattgaatttgccagttggaggtttgtaacctcagatcaactggtagctggtaacttaagaagttatgcagctgaaggtttgtatcggtcattacttgacacgtttttacctgatattatgaaatccttatgatctctttatacttgcatatacaaagaataattcacgcaggc

SEQ ID NO: 14603 - RNA, 197 nt, unidentified
  source 1..197: mol_type = other RNA; note = Related to NZ_CP049834.1; note = Aquirufa sp.
gtctgccgtaacaaattgaaattcgccatttggagattgtataaatctcaaatcggatggtattctggatatttcaggatgaatgtttcttggtttttatataatatttaaaaattaagaatattattatttttattattttaatattatttgggaaaataatatttagatcatatacaaagaatttcacggcagac

SEQ ID NO: 14604 - RNA, 259 nt, unidentified
  source 1..259: mol_type = other RNA; note = Related to NZ_CP094531.1; note = Chryseobacterium sp.
gcctgttttaagattttgattttgcctgctgttggagatttttccaaaaaccggcaggtgttccgaaagtttgcactttcggaataaaggttaggtgattatttattgtcgattttcttcagttgagattttatttattatttcaatagaattttattattatatatttcaacgtgggtctacgcccaaaaactgatattagtaaaaaccctcacttattttttttataattgaatagataaagaaaacagaaacaggc

SEQ ID NO: 14605 - RNA, 263 nt, unidentified
  source 1..263: mol_type = other RNA; note = Related to CP033935.1; note = Chryseobacterium balustinum
gcctgttttaagattttgattttgcctgctgttggaagttttcccaaaaatcggcaggtgttccggagatgtaaatcttcggaataaaggtttggtgatcatttattgtagatttttcttcagttgagatttatttatttattatttcaataggaattttattattatttatttcgatggggcgctacgcacaacaactgatctcagtaaaaaccctcacttatttttttataattgaatagataaagaaaacaaaaacaggc

SEQ ID NO: 14606 - RNA, 264 nt, unidentified
  source 1..264: mol_type = other RNA; note = Related to VOXE01000004.1; note = Chryseobacterium sp.
gcctgttttttagattttgatttcgcctactgttttttgtaggtattcctggcgaagctagggatgatgaaggtttcttttataaattgatttagatttataggtcttagtagactgaggatattattttataataattggtaatattattttagtagatcattggttttactttattacatcttgaatttttgatcaatttaatttcagaagtaccctcacttattttagcaattgaatatataaagaaaacacaaaacaggc

SEQ ID NO: 14607 - RNA, 241 nt, unidentified
  source 1..241: mol_type = other RNA; note = Related to NZ_LR134503.1; note = Kaistella jeonii
gcctgtttttaagattttgatttcgcttgctgttgggtctcccaaaaatcggcaagtgttccggaaattattttccggaatgaaagtttggactttatagtaattagagagaattttgattaacaatattttaatatatattattatttatattttgttgtcaggattgccctcgctcattacgctgtcctttcttataccttatttaaagtcgaatagataaagaaaacaaaagacaggc

SEQ ID NO: 14608 - RNA, 237 nt, unidentified
  source 1..237: mol_type = other RNA; note = Related to JAFIBT010000001.1; note = Chryseobacterium sp.
gcccgtttaaattttgactacgcctactgttttttgtaggtattccaatttattggaataaattaatggattagttagcagcacatatatatacgataatatttttatattaatttaacttttactatttataaattatcttaaattttatatgaattttgttaactaacatttatatgatgattatcaattatgctttttggctatcttaaataaaataaagaaaaacaaacgggt

SEQ ID NO: 14609 - RNA, 233 nt, unidentified
  source 1..233: mol_type = other RNA; note = Related to JADJJD010000012.1; note = Saprospiraceae bacterium
acttgcctcaagatattgattcgtgggtgctgggagtaattgagaaatcaatgaaacaatgatcggcatctttatcctgatctcggttgggatgaatgtcactaagacatacgccattgtggatgttggcctaataaccaatcgtctgaacttaagatgtaattattagtgataaatagttaataagtcttccttcaactgtatcctgtatacaaaaagagtatccggcaagt

SEQ ID NO: 14610 - RNA, 231 nt, unidentified
  source 1..231: mol_type = other RNA; note = Related to QKTX01000002.1; note = Algoriphagus aquaeductus
acctgcctaaggtattgattcgtgggtgctggtcccgagtaatcgggacatgatcggcatcttttcccggcccaaagtcgggatgaatgtccctcgggcattattgaagcgttttgcctcctctcggggatgtgaagcttttggttgattctgtataaaaagttctttatgaatttattgataaagaatatacaaagattcatttccatacaaatagagtatcaggcaggt

SEQ ID NO: 14611 - RNA, 240 nt, unidentified
  source 1..240: mol_type = other RNA; note = Related to JADZFD010000065.1; note = Saprospiraceae bacterium
acttgccacaagatattgattcgtgggtgctgggagtaactggataaccagtgaaacaatgatcggcatcttctcccgacctctggtcgggatgaatgtcacttagcatttttaacatggattgttgattttaaaataaaaaatcaatagaaacaaattgttattaatataaaaagtgaacaataggtatcgaatttagctgcagctgaattatccatacaaaaagagtatccggcaggt

SEQ ID NO: 14612 - RNA, 213 nt, unidentified
  source 1..213: mol_type = other RNA; note = Related to VGMK01000021.1; note = Bacteroidetes bacterium
acttgccagaaggtattgattcgtgggtgctggtctcaaatttcggtttgagacatgatcggcatcttctcccgacctgtgttgggatgaatgtcacttaggaatttattgcagtgtgtattgatttcaatgtcaatatgaaattgttatttatgaatttattagtgattaataggtattgatttatacatacaaatagagtatcaggcaggt

SEQ ID NO: 14613 - RNA, 237 nt, Flavobacterium sp.
  source 1..237: mol_type = other RNA; note = Related to NZ_NOXV01000174.1; note = Flavobacterium cyanobacteriorum
acttgccacaagatattgattcgtgggtgctggtctcagatttcggtttgagacaatgatcggcatcttctcccaacctctggttgggatgaatgtcacttaggcatttttaacagcggttattgatttcaatatcaataatatgaagttgttattgatgtaattattagtgatgaataggtattgatttcagttgtaatgattgaaatattcatacaaaaagagtatccggcaggt

SEQ ID NO: 14614 - RNA, 230 nt, unidentified
  source 1..230: mol_type = other RNA; note = Related to QNTX01000003.1; note = Elizabethkingia miricola
acttgccacaagatattgatttgtgggtgctggttctagatttcggtttggaacattgatcggcatcttctcccgaccactggttgggatgaatgtcacttaggtatttttaacagcttattgattttaataatttattagttgttattatgtatttatttgtgatttattgatttagaatttcagttatttttattgaaatattcatacaaaaagaatatttggcaggt

SEQ ID NO: 14615 - RNA, 308 nt, unidentified
  source 1..308: mol_type = other RNA; note = Related to JAGPCT010000008.1; note = Saprospiraceae bacterium
acttgccacaagatattgattcgtgggtgctggaagtaactggttaaccagtgaaacaatgatcggcatcttctccctacctatggtagggatgaatgtcacttaggcatttctaacagcggaaacaataatcggcatcttctcccaaactgtggtagggatgaatgtcgcttaggcatttctaacaacggttattgataagaagaacaataatattaagttgtaattgatgtaattcttagtgatgaatatcgattgaatttcagttcatgtaattgaaatacatacaaaaagagtatcaggcaagt

SEQ ID NO: 14616 - RNA, 229 nt, unidentified
  source 1..229: mol_type = other RNA; note = Related to JAAZMS010000454.1; note = Bacteroidales bacterium
acttgccacaagatattgattcgtgggtgctggttccgaattatcggaacaatgatcggcatcttctctcaacctttggttgggatgaatgtcactagagtcatttttaacagtgcttaactattgattctctgcagaactgttatttatgaattattctttattctgctgaattaacttagcttaagctgaggctgaattattcataccaatagagtatccggcaggt

SEQ ID NO: 14617 - RNA, 241 nt, unidentified
  source 1..241: mol_type = other RNA; note = Related to NZQO01000147.1; note = Flavobacteriaceae bacterium
acctgtcctaagatattgaaacgtgggtgctggctctagatattgttctaaggcaatgatcggcatcttctcccgaccactagtcgggatgaaggtcacttaggcattttgatcagctctgttattaatctcagtatttataatatgaagttgtcattgatgtatttataagtgatgaataggtattgcacttcagttgaaatgattgaaatgttcatacaaatagagtatccgggcgggt

SEQ ID NO: 14618 - RNA, 232 nt, unidentified
  source 1..232: mol_type = other RNA; note = Related to BMWX01000006.1; note = Echinicola pacifica
acctgccgtaaggtattgattcgtgggtgctgtcccggttttctgggaaacgatcggcatccttttccttccaaaagggccggccagcccggagggaatgaaggttatattggtaaaacacagattcatcatccagcttttgctgaactcttgggtttctgtttttttattatgttatgtatggatttaggtaatcaacattacttcaatacacatagaatatctggcaggt

SEQ ID NO: 14619 - RNA, 231 nt, unidentified
  source 1..231: mol_type = other RNA; note = Related to NZ_CP080025.1; note = Echinicola sp.
acctgcctaaaggtattgattcgtgggtgctgtcccggtttcccgggaaaagatcggcacctctttcccttcatatgggccggccagcccggagggattgaatgttattttggtaaactccaatcgacttcccttgtgttgttcttcctttggatatcgattattgtttatgatgatatatggattgatgaaatatacacacattcattacaaatagaatatccggcaggt

SEQ ID NO: 14620 - RNA, 268 nt, unidentified
  source 1..268: mol_type = other RNA; note = Related to NZ_JACYTQ010000004.1; note = Echinicola sp.
acctgtccgaagatattgattcgtggatgctggcttattcatttaagtatggatcgagcaatgatcggcatcttttccctaccatttgggttggccagcccggtagggaagaatgtttctacttgaataattaatggttttcatctttagttatattagctattgaacttgactgttattatttatgatattgatgtattttctggagtttaagctaatttattttagcacagaatcatcatccttacaaaaagagtatccgacaggt

SEQ ID NO: 14621 - RNA, 237 nt, unidentified
  source 1..237: mol_type = other RNA; note = Related to JADYZM010000024.1; note = Flavobacteriales bacterium
acttgccacaagatattgattcgtgggtgctggaagtagttgggaaaccaatgaaacaatgatcggcatcttctcccgacctctggttgggatgaatgtcactgagacatttttaccagctactattgatttcaacgtcaataatataatgttgttattaatgtaattattagtgaagaataggtattgaatttagctatagctgaaacattcatacaaaaagagtatcaggcaagt

SEQ ID NO: 14622 - RNA, 236 nt, unidentified
  source 1..236: mol_type = other RNA; note = Related to NZ_CP041345.1; note = Tenuifilum thalassicum
acttgcctaaagatattgatttgtgggtgctggcctaaatttgtttaggcaatgatcggcatcttattccaacttttgttggaatgaatgtcagagtggcattaatgagcacagtttctgagcataacttcagaactgagatttacattgacgccagtaataacgctgactaagaataacccctaattaaattttttttttttggtctttaatacttatagagtatcagggcaggt

SEQ ID NO: 14623 - RNA, 247 nt, unidentified
  source 1..247: mol_type = other RNA; note = Related to QMPL01000018.1; note = Bacteroidetes bacterium
acctgccaaaagatattgactcgtgcatgtcggttttgttgcttgcaacaaaacaatgatcgccatgttttcccgaccttttggtcgggatgaatgtctctgatgaattaatagctggttgtcatattatatctgaaatgatatgatgcaatgaaactgttattgatgaatttattagtgatgaataggattacggatttcagttaataaagctggaatattcatacataaagagtatcgtgtaggt

SEQ ID NO: 14624 - RNA, 242 nt, unidentified
  source 1..242: mol_type = other RNA; note = Related to JAGPFM010000063.1; note = Bacteroidales bacterium
acttgcctaaagatattgactcgtgcatgctggttttgttggcgacaacgaatcaatgattggcatgttctcccgacctctggttgggatgaatgtccctgacgaatttataacggctaatgtcttgtaatagaggtttattataagatatgaagttgttattgatgaatttttcagtgatgatagaaatcgaattcaattgaaatgttgaattgttcatacataaagagtatcaggcaggt

SEQ ID NO: 14625 - RNA, 208 nt, unidentified
  source 1..208: mol_type = other RNA; note = Related to NZ_WOFO01000011.1; note = Cyclobacterium sp.
acctgccaaaaggtattgattcgttggtgctgttccgggtaactggaaactgatcggcaccttttcccagaaagttctgggatgaacgttccttaggaatgatcaagctccttaataggatttaaacttttctggttttgaagacgatgatatgtttgataaataaaaataccacagattcttcataccaatagaatatccggcaggt

SEQ ID NO: 14626 - RNA, 217 nt, unidentified
  source 1..217: mol_type = other RNA; note = Related to AMZY02000008.1; note = Mariniradius saccharolyticus
acctgccaaaggtattgatctgtgggtgctgtttcggtttatcgaaaagatcggcacctgttcccgacatttgttgggataaatgtctcttgggaattttccaactcctgagtagacttctgacctccatttggtcctttgatagtttagtctttatagatattttatgtatttataattacacaaattcatcatacgcatagaatatcaggcaggt

SEQ ID NO: 14627 - RNA, 220 nt, unidentified
  source 1..220: mol_type = other RNA; note = Related to JADJXZ010000008.1; note = Crocinitomicaceae bacterium
acctgtcctatgatattgatcgtgggtgctggtctcagatttcggtttgagacaatgatcggcatcctgtcctgcaaatctaggatgaatgtaatgaagcattgtgtcatcaatggcgttcggtaacgggtcatcaacccatccgaaatgttttattatttattaatttatagattttggtgatattattatcaacacacaaaaagagtatcggacaggt

SEQ ID NO: 14628 - RNA, 219 nt, unidentified
  source 1..219: mol_type = other RNA; note = Related to JAJTAY010000029.1; note = Bacteroidia bacterium
acctgccacaagatattgacccgtggatgccgggagtaggtccgctggcccggactgaaacaatgatcggcatctcttcccggatgttttccgggatgaatgtccatgaggcattgtagtcagttgctattgattgaataatcataatagcaattgatatcatgataaatgaattagtaatcattatcatgatacatacataaagagtatcaggcaggt

SEQ ID NO: 14629 - RNA, 252 nt, unidentified
  source 1..252: mol_type = other RNA; note = Related to DOXR01000029.1; note = Bacteroidales bacterium
acctgcctaagatattgattccggatgctgggagtaattgggaaaccaatgaaacaatgatcggcatctcttcccgcccttgaggtccttgtggcacttgtggctgggataaatgtccattggacatgtctggagcctgcatagcatttatagcaatgaatgaaattcaagatatgaagctatgtaagctagatatgattgagatcttgtgagatcaagcacgagctcatacataaagagtatcaggcaggt

SEQ ID NO: 14630 - RNA, 202 nt, unidentified
  source 1..202: mol_type = other RNA; note = Related to JAHUUM010000008.1; note = Weeksellaceae bacterium TAE3-ERU29
acctgtcaaaagatattgatttcggatgttggtttcaattttaaaattgaaacagatcggcatcttctctactcggtagaggctgaatgttaggaggtaaattcaatatagatttaagatatatttttatattttaatcctatctaatttacccccactaatttatttcaagttaatttatacaaaaagaatatcgataggt

SEQ ID NO: 14631 - RNA, 262 nt, unidentified
  source 1..262: mol_type = other RNA; note = Related to NZ_AJYA01000040.1; note = Nitritalea halalkaliphila
acctgccataagatattgattcgcgggtgctggccctgctctggcagggcaatgatcggcatctattcccaatcgcgtattgggatgcatgtgtggagagcattctcaatttaaatgaaacagtatatatgtatactattcatttaaaatgcgccattaacattctaatttaccccgctactggggaaatagacctttgacagtgtcgatacacaggtatcggggtcatcggtcctacatacaaatagagtatccggcaggt

SEQ ID NO: 14632 - RNA, 214 nt, unidentified
  source 1..214: mol_type = other RNA; note = Related to NZ_CAKLPZ010000001.1; note = Lewinella maritima
gctcgcccagaagatattgactcgtgggtgctggttctagctacggctcggaacaacgatcggcacctcttccctgatttcggtccgggatgaacggttttcagttgaggatctagatagatgcagatgaatgaacgtataacgcttatttatttatgcatataggtgtacgctttaggattagagtgtggcacaaatagagtatcgggcgagt

SEQ ID NO: 14633 - RNA, 196 nt, unidentified
  source 1..196: mol_type = other RNA; note = Related to NZ_JAATJH010000004.1; note = Lewinella antarctica
gcctcaagatattgattcgtggatgctggcactggttccgaccggtgcaatgatcggcatctcttccgggctactagtccggtcgaatggcccagagagatttgggctcttttgaggatcttaatcaataaatgattatggtttttatgaatttatgaggatttaaagcttcatacaaatagagtatcggacgggt

SEQ ID NO: 14634 - RNA, 247 nt, unidentified
  source 1..247: mol_type = other RNA; note = Related to PXTU01000456.1; note = Bacteroidetes bacterium SW_10_40_5
acctgcctaagctattgattcgtgcgtgctggttcgctttttggcggacaatgatcggcacgtgagtccggctttatgccgggctgaatgtcaaaagggcattttgtcggctactgccttgattaaatctccttattcttcttggaaagggatgttatgaataaggcttagcaatgctttaattgatatatttatttataaattatataaacatacttttccatacggagagaatacaaaggcaggt

SEQ ID NO: 14635 - RNA, 258 nt, unidentified
  source 1..258: mol_type = other RNA; note = Related to NZ_FNQK01000004.1; note = Bizionia paragorgiae
acctaaacaaaagtattgatcgcgtatgctggtttaattagtagtaattaaacaacgatcggcatatattctaatcgtttattcgattggaataagaatgttatttttaattagtccacaatgtttaaaacacataattggttctaattatttatagcatttattatattttttatattattattatatattatttcaatgtaatattaataagatatgtaaagtttaaaatcatacaaaaagaatagacgtttaggt

SEQ ID NO: 14636 - RNA, 273 nt, unidentified
  source 1..273: mol_type = other RNA; note = Related to NZ_CP039451.1; note = Psychroserpens sp.
acctaaacaaaagtattgatcgcgtatgctggtttaattagtaataattaaacaacgatcggcatatattctaatcgtgtattcgattagaataagaatgttaattattaattagtccacaatgtttaaaacacaaaaaatggtttaatttttaaatagatagcattatattatttatatattatttagttctattattattattattattattattatttagatctatttatattaagtttaaaatcatacaaaaagaatagacgtttaggt

SEQ ID NO: 14637 - RNA, 257 nt, unidentified
  source 1..257: mol_type = other RNA; note = Related to FTMA01000004.1; note = Maribacter ulvicola
cccaaactgaaattattgaaagcatatgctggcctgatgattaattcaaaggcaataatcggcatataatcctatagaaatataggatgaatgttatttgttaattgtaaatagacatggcaaataaagaaaagacttttatgtttttgataacattgtcattatttcatttacagttcatataatttatttttttttaaaggcttgaatgctactaaggttttcaatcgtcatacaaaatgaataaaaggtttggg

SEQ ID NO: 14638 - RNA, 251 nt, unidentified
  source 1..251: mol_type = other RNA; note = Related to NZ_CP042476.1; note = Antarcticibacterium arcticum
acctgcccgaaagatattgactttgggtgctggtcctgaaattatcaggacaatgattggcacctgtacccgactttatgtcggcaaaatgttagcggatgatttagacctcgtttcaaaacatccactgataattttattatgattttattatttttaattaagatctgttttattattaagacaaaagttaaagttattaatgacttagtttttgaattataacatacataaagagtatcggggcaggt

SEQ ID NO: 14639 - RNA, 238 nt, unidentified
  source 1..238: mol_type = other RNA; note = Related to JAJSON010000015.1; note = Gramella sp.
acctgcccacagagatattgaatttgggtgctggtcctgaaattatcaggacaatgatcggcatctttacccgacttttagtcggccaaaggttagtgaggaattgaatcctaaatttcaaaacctccacttattatttttttatgatttattattataaactatttcaagacaaatgaattagttctgattattgaaattgctttataatatatacttaaagagtatccgggcaggt

SEQ ID NO: 14640 - RNA, 199 nt, unidentified
  source 1..199: mol_type = other RNA; note = Related to DMXI01000354.1; note = Microscillaceae bacterium
acctgtctaaaatattgatttggtgctgtcttgatcctatcaagaagatcggcatcggtttccagtctctcacgggattgggaaaggtttatttagacatcataagtttatttcaaaaatggctcgaaaaaccttaataataaataaataattaataacaatttattacggttacatacataaggaatacaagacaggt

SEQ ID NO: 14641 - RNA, 244 nt, unidentified
  source 1..244: mol_type = other RNA; note = Related to NZ_RJUG01000002.1; note = Kaistella daneshvariae
atctgcattattgaattttgattgctgggagtaactgcaaagtgaaacaatgatcggcaatcggctctttattccgtaaggtgtagggagcataatgttagttgacaattttttgcagttaacatatttggcaatttagctgaatggctattatctttttatcttttattatctttttaacattaggtacattggcatttagacatttcggttaacgattcatacataaagaatacatgcagat

SEQ ID NO: 14642 - RNA, 239 nt, unidentified
  source 1..239: mol_type = other RNA; note = Related to JAAFAH010000017.1; note = unidentified bacterium
aactgccgaaaggtattgaattatggatgctaccccatatggggtttaaagattggcatctttgtccggtttaccggactgaatgtttctataaaattatgtttaggatttctaactaattttaaagaatctattattaaatgaatatttattttaattgaatatttattgaaaaaacttaacatttcttttgaaataatttaagttaatatattcatacacaaagagtactggcagtt

SEQ ID NO: 14643 - RNA, 246 nt, unidentified
  source 1..246: mol_type = other RNA; note = Related to ALNN01000005.1; note = Capnocytophaga sp.
acctgtgagtatattgatttctttgattgctggaagtttgagttatccctttttggatgatttaagtttcaggtcggcaattggcttaggattttcctaagtataaggttaccaatggatcaagataaatatagctatattatattgatattgatttatattgatattgaaaatatcatttttcttgatttcataagaaccttctctggtatattatattcatacaagtagaatagaaatacaggt

SEQ ID NO: 14644 - RNA, 210 nt, unidentified
  source 1..210: mol_type = other RNA; note = Related to JAACZX010000460.1; note = Chitinophagaceae bacterium
accggttaaatgttttgacttcgcagggcgtatcgccctgtagctttttccagtaacggaaaaaggaaaagttctttatagtcgaattgtgctgttgagaactattttggcctattaacccccgttaatttttgttttaattgggaataatagatatgtatttgatgtttttatgtctgttggacctggacatcatagaaaacaaccggt

SEQ ID NO: 14645 - RNA, 201 nt, unidentified
  source 1..201: mol_type = other RNA; note = Related to JAFDXN010000025.1; note = Bacteroidetes bacterium
gcctgctaacgaaattgattttcgcctgttggccttcgggcagatcgacaggctgtctgtttcctgcaaaggaggcagatgaatgtatctgtagtcattagtagcaatactgcttttaagatttaagatataattgatatttttattattgataatagtcttagttggctatgttcatgtagaaagagttttacggcaggc

SEQ ID NO: 14646 - RNA, 236 nt, unidentified
  source 1..236: mol_type = other RNA; note = Related to JACJYQ010000002.1; note = Lewinellaceae bacterium
gcccgcttgaagatattgaatcgtgcatgctggacttatccatttaggaataagtcagatcggcatgctactctgtatcgggtttccggtacggaggtaatgttctttggtcattgattagtattgaaattcattgtatgttatttattaatataataattaatttataatatataataagaattcattattaatagatgcctttaattttcatacaaaaggaatattgtgcgggt

SEQ ID NO: 14647 - RNA, 225 nt, unidentified
  source 1..225: mol_type = other RNA; note = Related to JAGOPY010000019.1; note = Bacteroidales bacterium
gcctgcccataatattgaacgtgcgcgaccgtttcggagcgttttcccgactttgtcgggatgaatgtcataacatgatttgtcgttgtgaaacgattaattaattgacgttttgtattgtgaataatagaaaggtgaatagaaatgtgaagattattttttttctcattttttaataattcataccctctcttaatttcattcataaagaatagaccggcaggc

SEQ ID NO: 14648 - RNA, 222 nt, unidentified
  source 1..222: mol_type = other RNA; note = Related to JAFGOZ010000659.1; note = Bacteroidales bacterium
gcctgctcagagatattgaacgcgcatgctggtcccgccctcgggcgggacagatcggcatgtttccctgacttcggtcggggtgaatggtttctggttatagaaattgactgcggaagcatcacaagctgacgcttaaactcattcgtaacttcaaaccataaacacttaagccattagcatcgctaatgctaatacatacataaagaatattgagcaggc

SEQ ID NO: 14649 - RNA, 194 nt, unidentified
  source 1..194: mol_type = other RNA; note = Related to JACMPG010000245.1; note = Spirosoma sp.
gcctgttccgacaggtattgattttctgcacgtgcgtttcgccgtgtggccccggcgcaagctgcgggctgactgtaattgggtaattgatactgattatgattattgaacatgatcttagttattattaattatttaaattattagtagtaaaaagaagattgtgcatacataaagagtaccggcctactggc

SEQ ID NO: 14650 - RNA, 194 nt, unidentified
  source 1..194: mol_type = other RNA; note = Related to NZ_JACXAA010000017.1; note = Spirosoma sp.
gcctgtcctaaggtattgattgtgtgcacgtgcgtttcgctgtgtagtctggtgtaagccggactgaatgtagttgggtaattggtggtgttgatggttgaagtgaatgctctttaactgttggcctggactgtattactttaattatattattaattattgtatgcttattcatacataaagagtaccgaggc

SEQ ID NO: 14651 - RNA, 193 nt, unidentified
  source 1..193: mol_type = other RNA; note = Related to NZ_QGGO01000004.1; note = Arcicella aurantiaca
agacacccacaaggtattgatttttgcaaagcgtttcgctttgtggtttaggcattgttctaaacgtaatgttatgtgttaacatcgttgcaagacatttgtgacgtatttagacatattactattatatatattatttatttaataatgtgggaagtaggttcaattcatacaaaagaatacgtgggtgtct

SEQ ID NO: 14652 - RNA, 217 nt, unidentified
  source 1..217: mol_type = other RNA; note = Related to JADJRO010000003.1; note = Saprospiraceae bacterium
gccaacaaaaagattttgaactgttcattgcgatttgcaatgtcggccagcaatggctgtttaaatggtagttattttaattgttcagcattgagctataatgaacatttagttattgaatatatcagtaattaatatattataataaaatatgaataaatgaatattgccatcattgaatttatgatggattcatccataaagaaaatcagttggc

SEQ ID NO: 14653 - RNA, 197 nt, unidentified
  source 1..197: mol_type = other RNA; note = Related to NZ_JNLX01000031.1; note = Hymenobacter sp.
atctgcgttagggcttttgaccccgtgcggcgttgcgccgcgcccgtttaaacaacggcagtaatgacagtaaacgaaattgattaaaatgatttaattgattttttgtcattattatctttttgaatagttgatgatttttatcaattatttatttcttatacaataagtataggatatgaaaattcccagcagat

SEQ ID NO: 14654 - RNA, 201 nt, unidentified
  source 1..201: mol_type = other RNA; note = Related to NZ_SRLD01000019.1; note = Hymenobacter elongatus
acctgtgactggggttttgaccttgtgcggcgttgcgccgcgcccgttctgacaacggcatcattgacagttgactcgattgattaatttgatttaattaattgatttgattgactctgaattgagttttaattcagaatttattttttgaattattatctgcttcttaagtagaagacgcaaagaaaactcccggcaggc

SEQ ID NO: 14655 - RNA, 199 nt, unidentified
  source 1..199: mol_type = other RNA; note = Related to NZ_QYCN01000007.1; note = Hymenobacter rubripertinctus
acctgtgactggggttttgaccttgtgcggcgttgcgccgcgcccgttttgataacggtatcattgacagttgacttgattaatttttatttaattaattgattttattgtctttgaattgagtctttattcagaatttattttgaattatcatctgctttccttgaagtagaagacgcaaagaagactcccgacaggt

SEQ ID NO: 14656 - RNA, 219 nt, unidentified
  source 1..219: mol_type = other RNA; note = Related to JADKEM010000006.1; note = Bacteroidetes bacterium
acctgcggaaaggattttatttgtgttgcgtttcgcaacatgctccacaatgtgatttcattgtagattataattgtaatgattatgatgttagcgatgtagctgtaattgtgattattgtattaattgtttttaattgtttagttattattaattaatcattgatagagattattaatgtaattagatatagaaattaagaaaagaaatcccgcaggt

SEQ ID NO: 14657 - RNA, 128 nt, unidentified
  source 1..128: mol_type = other RNA; note = Related to NZ_WBWZ01000001.1; note = Brucella anthropi
aaaattacgaggtctcccctcgcatacgcgctgtagtaactgcggcgtaagaagaaatacaagtacaatatcgtacgctccatgtcgacaatctatgcttgacatgattggagggagacctcgtgcca

SEQ ID NO: 14658 - RNA, 128 nt, unidentified
  source 1..128: mol_type = other RNA; note = Related to NZ_LT599047.1; note = Brucella sp.
attggcacgaggtctcccctcgcatacgcgctgtagtaactgcggcgtaagaacgaatgaatttacaatatcgtgcgcgccactcggactttgtggacctggcgtgattggagggagacctcgtgcca

SEQ ID NO: 14659 - RNA, 75 nt, unidentified
  source 1..75: mol_type = other RNA; note = Related to NZ_JACIEE010000022.1; note = Rhizobium azooxidifex
cgagatacgaggtctcccctcgcatacgcgctgtcgtaactgcggcgtaagagcgagaggcggaactccgcaaaa

SEQ ID NO: 14660 - RNA, 129 nt, unidentified
  source 1..129: mol_type = other RNA; note = Related to NZ_CP083370.1; note = Ensifer sp.
ttcggcacgaggtctcccctcgcatacgcgctgtaggaactgcggcgtaagagcgaatgtatctacaatatcgtgcgcgccacgtatgcctgaatgcacatggcgtgattggagggagacctcgtgcca

SEQ ID NO: 14661 - RNA, 127 nt, unidentified
  source 1..127: mol_type = other RNA; note = Related to MEDN01000012.1; note = Agrobacterium sp.
cagattacgaggtctcccctcgcatacgcgctgtagtaactgcggcgtaagagctaacgtattcacaatgacgtgcgcgccgtgcacctatatgcacctggcgtgattggagggagacctcgtgcca

SEQ ID NO: 14662 - RNA, 131 nt, unidentified
  source 1..131: mol_type = other RNA; note = Related to SGOC01000001.1; note = Agrobacterium rhizogenes
ttgagcacgaggtctcccctcgcatacgcgctgtcgtaactgcagcgtaagagctcaagtcctaaacaagatcgttgcgcgccacactatgctctgtgcacctggcgtgattggagggagacctcgtgcca

SEQ ID NO: 14663 - RNA, 131 nt, unidentified
  source 1..131: mol_type = other RNA; note = Related to WIEG01000017.1; note = Rhizobium leguminosarum
tcgcacacgaggtctcccctcgcatacgcgctgtcgtaactgcggcgtaagagctcaagtcctaaacaagatcgttgcgcgccacactatgctctgtgcatctggcgtgattggagggagacctcgtgcct

SEQ ID NO: 14664 - RNA, 127 nt, unidentified
  source 1..127: mol_type = other RNA; note = Related to SIJW01000001.1; note = Rhizobium leguminosarum
tacagcacgaggtctcccctcgcatacgcgctgtcgtaactgcggcgtaagagcaaacgtacctacaatatcgtgcgcgccacttaatgcttcgagcatggcgtgattggagggagacctcgtgcta

SEQ ID NO: 14665 - RNA, 132 nt, unidentified
  source 1..132: mol_type = other RNA; note = Related to JAIUOD010000004.1; note = Proteobacteria bacterium
aagatttcgaggtctcccctcgcatacgcgctgttgtaactgcggcgtaagagtaaatgtcatttcaaggatcgtgttgcgccactgatcttcggattatcttggcgtgattggaagggagacctcgtgctg

SEQ ID NO: 14666 - RNA, 131 nt, unidentified
  source 1..131: mol_type = other RNA; note = Related to WBWG01000001.1; note = Brucella intermedia
gcgcctacgaggtctcccctcgcatacgcgctgtagtaactgcggcgtaagagctaacgtcgaatatagaatcgttacgccccatgatgtaatgacgcaacgggggtgattggaagggggacctcgtgcac

SEQ ID NO: 14667 - RNA, 131 nt, unidentified
  source 1..131: mol_type = other RNA; note = Related to VKHP01000048.1; note = Bradyrhizobium sp.
gaatttacgaggtctcccctcgcatacgcgctgtcgtaactgcggcgtaagagcgaaagtctcatcaaggatcttgcgcgccacgttgctcgctgaatgcctggcgtgattggaagggagacctcgtgccc

SEQ ID NO: 14668 - RNA, 131 nt, unidentified
  source 1..131: mol_type = other RNA; note = Related to NZ_LUFV01000044.1; note = Ensifer sp.
atgtccacgaggtctcccctcgcatacgcgctgtcgaaactgcggcgtaagagtaaacggcaactacaatatcgttcgcgcgcccaaaaccttatgaagcggggcgtgattggaagggagacctcgtgaca

SEQ ID NO: 14669 - RNA, 131 nt, unidentified
  source 1..131: mol_type = other RNA; note = Related to NZ_FOWZ01000002.1; note = Qipengyuania nanhaisediminis
gtccgaacgaggtctcccctcgcatacgcgctgtagcaactgcggcgtaagagcaaatgtctagacatgtcgtgcgcgccatgacgattgatgattaaccgtggcgtgattggaagggagacctcgtgact

SEQ ID NO: 14670 - RNA, 132 nt, unidentified
  source 1..132: mol_type = other RNA; note = Related to SLXW01000017.1; note = Sphingomonas sp.
agctggacgaggtctcccctcgcatacgcgctgtagtaactgcggcgtaagagcaaatgtctagatatgtcgtgcgcgccatgacgattgattgattgaccgtggcgtgattggaagggagacctcgtgccc

SEQ ID NO: 14671 - RNA, 131 nt, unidentified
  source 1..131: mol_type = other RNA; note = Related to NZ_CP039250.1; note = Sphingopyxis sp.
cggagaacggggtctcccttcgcatacgcgctgtagtaactgcggcgtaagagtaaaagtctagatatgtcgtgcgcgccatgaatatcgattgataaccgtggcgtgattggaagggagacctcgtgccg

SEQ ID NO: 14672 - RNA, 128 nt, unidentified
  source 1..128: mol_type = other RNA; note = Related to MIAM01000006.1; note = Sphingopyxis sp.
aggcgcacggggtctcccctcgcatacgcgctgtcgtaactgcggcgtgagagtcaatgtctagaagaaatcgtacgcgccgccgtatcacggagccatggcgtgattggaagggagactccgtgcca

SEQ ID NO: 14673 - RNA, 129 nt, unidentified
  source 1..129: mol_type = other RNA; note = Related to NZ_LHZT01000034.1; note = Acetobacter tropicalis
cgttagacggggttctcccctcgcatacgcgctgtagtaactgcggcgtaagagtaaacgtctgtgcatatcgtgatcgcccggatcatctgtttgacttggcgtgattggaagggagaccccgtgcca

SEQ ID NO: 14674 - RNA, 130 nt, unidentified
  source 1..130: mol_type = other RNA; note = Related to NZ_JH992904.1; note = Sphingobium yanoikuyae
tctcttacggggttctcccctcgcatacgcgctgtagtaactgcggcgtaagagtaaatgtctgcacatatcatgcccgccatgatcattcggtaattcctggcgtgactggaagggagaccccgtgcca

SEQ ID NO: 14675 - RNA, 128 nt, unidentified
  source 1..128: mol_type = other RNA; note = Related to JAAVJH010000001.1; note = Sphingomonas corticis
cattctacggggtctccccctcgcatacgcgctgtagaaactgcggcgtaagagtcaaagtctgcacctatcgtgcccgccgaatgcccttgggtgcaccggcgtgattggaaggggaccccgtgcca

SEQ ID NO: 14676 - RNA, 129 nt, unidentified
  source 1..129: mol_type = other RNA; note = Related to NZ_JACYUG010000002.1; note = Sphingomonas sp.
aaaatcacggggtctcccctcgcatacgcgctgtagcaactgcggcgtaagagtaaaagtcagcacacatcgtgcgcgccgtatgctccttgtgggccctggcgtgattggaagggagaccccgtgcta

SEQ ID NO: 14677 - RNA, 130 nt, unidentified
  source 1..130: mol_type = other RNA; note = Related to NZ_NSBT01000026.1; note = Actibacterium ureilyticum
gctctcacgaggtttcccctcgcaaacgcgctgtcgtaactgcggcgtaagagcaaatgtctgcacaagaatcgtgcgccccacatgagcttcgtgcacatggggtgattggagggggagcctcgtgcct

SEQ ID NO: 14678 - RNA, 130 nt, unidentified
  source 1..130: mol_type = other RNA; note = Related to QFVT01000013.1; note = Litorivita pollutaquae
tgatgtacgaggtttcccctcgcaaacgcgctgtcgtaactgcggcgtaagagcaaaagtctgcacaagaaacgtgcgcccaacatgagctatgtgcacatggggcgattggaggggaaacctcgtgcca

SEQ ID NO: 14679 - RNA, 129 nt, unidentified
  source 1..129: mol_type = other RNA; note = Related to CH959310.1; note = Sulfitobacter sp.
tgacctacgaggtttcccctcgcaaacgcgctgtcgtaactgcggcgtaagagcaaaagtctgcacaagaaacgtgcgcccaacatgagctatgtgcacatggggtgattggaggggaacctcgtgcca

SEQ ID NO: 14680 - RNA, 129 nt, unidentified
  source 1..129: mol_type = other RNA; note = Related to NZ_JAKFZM010000082.1; note = Leisingera sp.
agaggcacgaggtttcccctcgcaaacgcgctgtcgtaactgcggcgtaagagcaaatgtctgcacaagaaacgtgcgcccccagttgaccttgagccatggggtgattggaggggggacctcgtgcac

SEQ ID NO: 14681 - RNA, 129 nt, unidentified
  source 1..129: mol_type = other RNA; note = Related to JACZKS010000020.1; note = Rhodospirillales bacterium
cgcgccgcgaggtcttccttcgcatacgcgctgtagcaactgcggcgtaagagctaatgtctgcacaaatcgtgcatgccggaggatgtgcgtcaatcctggcgtgattggaaggaaggcctcgtgtcc

SEQ ID NO: 14682 - RNA, 127 nt, unidentified
  source 1..127: mol_type = other RNA; note = Related to JADGCC010000015.1; note = Alphaproteobacteria bacterium
tgtgctgcgaggtcttccttcgcatacgcgctgttgtaactgcggcgtaagagctaatgtctgcacatatcgcgggtcgcgcgcatgattcttagcgacgcgtgattggaaggaaggcctcgtgaca

SEQ ID NO: 14683 - RNA, 130 nt, unidentified
  source 1..130: mol_type = other RNA; note = Related to WHTM01000007.1; note = Hyphomicrobiales bacterium
gatgttgcgaggcctccccttcgcatacgcgctgtcgtaactgcggcgtaagagctaatgtctgcagatatcttgcgcgccctatgacctatgtgacccgggcgtgattggaaggggaggtctcgtgccg

SEQ ID NO: 14684 - RNA, 126 nt, unidentified
  source 1..126: mol_type = other RNA; note = Related to JAIEST010000134.1; note = Beijerinckiaceae bacterium
gagccggcgagatctcccttcgcatacgcgctgtagcaactgcggcgtaagagctaatgtctggataaatcgtggcgcgccgctctattgggcgccggcgatgattggaggggagatctcgtgcct

SEQ ID NO: 14685 - RNA, 131 nt, unidentified
  source 1..131: mol_type = other RNA; note = Related to NZ_NRRL01000154.1; note = Rhodovibrio sodomensis
tcaccagcggggtttcccttcgcatacgcgctgtcgtaaccgcggcgtaagatgaaacgtctgcacatatcgtgcacgctggccaatggtctttgtggctccggcgtgattggaagggaaaccccgtgcca

SEQ ID NO: 14686 - RNA, 130 nt, unidentified
  source 1..130: mol_type = other RNA; note = Related to NZ_LMUJ01000012.1; note = Acidisphaera sp.
gattgcgcgaggtctcccttcgcatacgcgctgtcgtaacctgcggcgtaagagctaatgtcagcacagatcgggcgcgccatacgatgattgatgcgcgcggcgtgactggaaaggagacctcgtgccg

SEQ ID NO: 14687 - RNA, 126 nt, unidentified
  source 1..126: mol_type = other RNA; note = Related to SUEQ01000018.1; note = Mesorhizobium sp.
gggtcaacggggtctcccttcgcatacgggctgtgcaactgcggcctaagagctcatgtctggacatatcgagcgcgccgttcgacccggagcaactggcgtgattggaagggagacctcgtgcca

SEQ ID NO: 14688 - RNA, 126 nt, unidentified
  source 1..126: mol_type = other RNA; note = Related to REES01000140.1; note = Rhodospirillales bacterium
gtcgcaacggggtctcccttcgcatacgggctgtgcaactgcggcctaagagcgaacgtctggacacatcgagcgcgccgttcgacactgggtggctggcgtgattggaagggagaccccgtgcca

SEQ ID NO: 14689 - RNA, 126 nt, unidentified
  source 1..126: mol_type = other RNA; note = Related to RCVT01000005.1; note = Sphingomonas sp.
attttgacggggtctcccttcgcatacgggctgtgaaactgcggcctaagagcgaatgtctagacgcatcgtgcccgccgagcgacactgggcgactggcgtgattggaagggagatcccgtgctt

SEQ ID NO: 14690 - RNA, 123 nt, unidentified
  source 1..123: mol_type = other RNA; note = Related to NZ_SSTI01000022.1; note = Sphingomonas olei
tccctagcgaggtctcccttcgcatacgggctgtgcaactgcggcctaagagcgaatgtctgcacacatcattgcgcgccattcgatggaccgtggcgtgattggaagggagacctcgtgtcg

SEQ ID NO: 14691 - RNA, 126 nt, unidentified
  source 1..126: mol_type = other RNA; note = Related to JAGMXV010000066.1; note = Rhizorhabdus sp.
cgtccaacggggtctcccttcgcatacgggctgtgcaactgcggcctaagagcgaaagtctagacacatcgagcgcgctgcccgttaatgggcgactggcgtgattggaagggagacctcgtgtcg

SEQ ID NO: 14692 - RNA, 126 nt, unidentified
  source 1..126: mol_type = other RNA; note = Related to NZ_CP093335.1; note = Sphingopyxis granuli
atgccaacggggtcttccttcgcatacgggctgtgcaactgcggcctaagagcgaatgtctggacacatcgagcgcgcagctctttacggggcgactggcgtgattggaagggagacctcgtgcca

SEQ ID NO: 14693 - RNA, 125 nt, unidentified
  source 1..125: mol_type = other RNA; note = Related to CP038440.1; note = Brevundimonas sp.
agccgggcggggtctcccttcgcatacgggctgtgcaactgcggcctaagagcgaacgtctccacacatcgtgcccgcgcgtgcttcatggcaacctcgcggattggaagggggacctcgtgaca

SEQ ID NO: 14694 - RNA, 124 nt, unidentified
  source 1..124: mol_type = other RNA; note = Related to NZ_CP018171.1; note = Aquibium oceanicum
agctggacggggccactcttcgcatacgggctgtgtaactgcggcctaagagcaaacgtctcgacatatcttgcccgccgagtgcttgtggcgagcggcgtgattggaagggggccccgtgcca

SEQ ID NO: 14695 - RNA, 128 nt, unidentified
  source 1..128: mol_type = other RNA; note = Related to NZ_QAYG01000015.1; note = Breoghania corrubedonensis
cggtctacgaggtctcccctcgcatacgcgctgtgcaactgcggcgtaagagctaatgtctcgatatatcgtgcgcgccatcgtaacctggtgtgacttggcgtgattggaagggagacctcgtgccg

SEQ ID NO: 14696 - RNA, 129 nt, unidentified
  source 1..129: mol_type = other RNA; note = Related to JAIETD010000062.1; note = Methylobacterium sp.
ccgtgtacgaggtctcccttcgcatacgcgctgtgcaactgcggcgtaagagctaatgtctggggataacgtgcgcgccaccctaatcttgtgtgaccgtggcgtgattggaagggagacctcgtgccg

SEQ ID NO: 14697 - RNA, 127 nt, unidentified
  source 1..127: mol_type = other RNA; note = Related to JAFBAI010000383.1; note = Xanthobacteraceae bacterium
acgaccacgaggtctcccctcgcatacgcgctgtgcaactgcggcgtaagagtgaatgtctcgagaggacgtgcgcgccatacggctattacgtgagtggcgtgattggaggggagacctcgtgcca

SEQ ID NO: 14698 - RNA, 127 nt, unidentified
  source 1..127: mol_type = other RNA; note = Related to NZ_CP021912.1; note = Erythrobacter sp.
ccctgggcgggatatctcttcgcatacgcgctgtgcaactgcggcgtaagagctaacgtcaacgcaaatcgtgcgcgccgaggcttctcgggaacccgggcgtgattggaagagatatcccgtgcca

SEQ ID NO: 14699 - RNA, 127 nt, unidentified
  source 1..127: mol_type = other RNA; note = Related to JAGOQV010000032.1; note = Alphaproteobacteria bacterium
tgttttacggggtctcccctcgcatacgcgctgtgataactgcggcgtaagagctaatgtctagtacaaatcgtgcgcgccaacgtgttatgcgtgcttggcgtgattggagggagacctcgtgcat

SEQ ID NO: 14700 - RNA, 128 nt, unidentified
  source 1..128: mol_type = other RNA; note = Related to SUEX01000026.1; note = Mesorhizobium sp.
tcccttacgaggtctcccctcgcatacgcgctgtagtaactgcggcgtaagagctaacgtctgcacagatcgtgcgcgccaatcgactatgcgacacttggcgtgattggaagggagacctcgtgctg

SEQ ID NO: 14701 - RNA, 128 nt, unidentified
  source 1..128: mol_type = other RNA; note = Related to CP019966.1; note = Rhodopseudomonas palustris
ttatgtacgaggtctcccatcgcatacgcgctgtagtaactgcggcgtaagagctaaagtctgtgcaaatcgtgcgcgccacatgcgcaatgcgagcatggcgtgattggaagggagacctcgtaact

SEQ ID NO: 14702 - RNA, 129 nt, unidentified
  source 1..129: mol_type = other RNA; note = Related to NZ_WOAC01000030.1; note = Mesorhizobium sp.
tgcttcacgaggtctcccctcgcatacgcgctgtagtaactgcggcgtaagagctaatgtctgcacatatcgtgcgcgccatatcgacaatgcgacacatggcgtgattggaagggagacctcgtgccg

SEQ ID NO: 14703 - RNA, 127 nt, unidentified
  source 1..127: mol_type = other RNA; note = Related to JAIOIW010000047.1; note = Notoacmeibacter sp.
ttcttcacgaggtttcccctcgcatacgcgctgtagtaactgcggcgttagagctaatgtctgcacatatcgtgcgcgccatgggactcggtacacttggcgtgactggaggggagacctcgtgcca

SEQ ID NO: 14704 - RNA, 128 nt, unidentified
  source 1..128: mol_type = other RNA; note = Related to CP021181.1; note = Rhizorhabdus wittichii
gctgccacgaggtcttccctcgcatgcgcgctgtgcaactgcggcgtaagagctaatgtctaggaagatcgtgcgcgccaggaacccttgggcgaccccggcgtgattggaaggaagacctcgtgccc

SEQ ID NO: 14705 - RNA, 127 nt, unidentified
  source 1..127: mol_type = other RNA; note = Related to QHJY01000004.1; note = Caulobacter sp.
agtcctacgaggtctcccctcgcatccgcgcggtggcaactgccgcgtaagagctcatgtctgcacatatcgtgcacgccacgtactacgggacgatcggcgtgattggaagggagacctcgtgacc

SEQ ID NO: 14706 - RNA, 132 nt, unidentified
  source 1..132: mol_type = other RNA; note = Related to SACP01000011.1; note = Methylobacterium oryzihabitans
ctcagtacgaggtctcccccctcgcatgcgcgctgttgtaactgcggcgtaagagcggatgtctgagtagatagtgcacgccccggtcagcacgatgaccatggcgtgattggagggggagacctcgtgcca

SEQ ID NO: 14707 - RNA, 128 nt, unidentified
  source 1..128: mol_type = other RNA; note = Related to SMAR01000071.1; note = Martelella mediterranea
atcaatgcgaggtctcccctcgcatgcgcgctgtagtaactgcggcgtaagagctaatgatctcagaatatcgtgcgcgtcacgagattatgacgccatgacgtgattggaggggaggcctcgtgccg

SEQ ID NO: 14708 - RNA, 126 nt, unidentified
  source 1..126: mol_type = other RNA; note = Related to NZ_VWNA01000001.1; note = Segnochrobactrum spirostomi
cttggcgcgagatttccgctcgcatacgcgctgtcgtaactgcggcgcaagagctaatgtgtcgagaaaacgggggcgccgtcaatgaggacgccactgcatgactggagcggagatctcgcacca

SEQ ID NO: 14709 - RNA, 128 nt, unidentified
  source 1..128: mol_type = other RNA; note = Related to CP031750.1; note = Cereibacter sphaeroides
tgccatacgaggtgctccctcgcactcgcgttgtcggaactgaaacgcaagacgcaatgaacagcacaagtctgtggcctgcataatctgatatcctatgcatgaatggaggggagcacctcgtgcct

SEQ ID NO: 14710 - RNA, 127 nt, unidentified
  source 1..127: mol_type = other RNA; note = Related to VSSR01000016.1; note = Bradyrhizobium cytisi
taatagaaggagcgccccctcgcataccgcgctgtcgtaactgcggcgtctgactcaacggttggtaacatgattgacggcccgaaatgctttgcatcgggcgagaaggagggggcgccccttttac

SEQ ID NO: 14711 - RNA, 127 nt, unidentified
  source 1..127: mol_type = other RNA; note = Related to JADPJU010000115.1; note = Bradyrhizobium sp.
ttaataatgcagcgccccctcgcataccgcgctgttgaaactgcggcgtttgaatgaatggtacgtcacttgattcgcggcccaatgctatatggcctgggcgagaaggagggggcgctcccttttt

SEQ ID NO: 14712 - RNA, 117 nt, unidentified
  source 1..117: mol_type = other RNA; note = Related to NZ_JYMS01000026.1; note = Bradyrhizobium sp.
gcgaccgcgccccctcgcatgccgctctgtcgtaactgcggagatttgaccgaaaggttctggatatgatcgcggcccgaatgccttgggctcgggcgagaaggagggggcgcactt

SEQ ID NO: 14713 - RNA, 128 nt, unidentified
  source 1..128: mol_type = other RNA; note = Related to SDYD01000559.1; note = Alcaligenaceae bacterium
cttgcgttgaggcctcctcgcattgcgcgctgttggaactgcggcgtctgactcaatgtccggtacaaaaggcccgacgatcgcgacgaatgatcaacaccgtcggagaaggaggaggtctcaccctt

SEQ ID NO: 14714 - RNA, 125 nt, unidentified
  source 1..125: mol_type = other RNA; note = Related to JADCGG010000223.1; note = Roseomonas sp.
atcatactaaggcgtctcctcgcatgacgcgtcgtgttaacgcgacgtttgaccgaatgttacctcaggatgtcgccgttgctttcggcggcttgccggcgatcagaaggaggagacgcctttca

SEQ ID NO: 14715 - RNA, 121 nt, unidentified
  source 1..121: mol_type = other RNA; note = Related to JAIVAG010000015.1; note = Yangia pacifica
tgcgatacgaggccttcctcgcaaaacgtgctgtgtaatcgcggcatgagatgaaaagttcagagaaatctgcgtctcgaacatcaatttccgttcgatgattggagggggcctcgtgcca

SEQ ID NO: 14716 - RNA, 128 nt, unidentified
  source 1..128: mol_type = other RNA; note = Related to NZ_PHJF01000002.1; note = Epibacterium ulvae
ctttgaacgagactctgcctcgcacaacgcgttgtcgtaactgcgacgtgagattaaaagttatactatatcagccaaaccatggtgatttgacacttcatggcgaaaggaggcggtgtctcgtgcca

SEQ ID NO: 14717 - RNA, 144 nt, unidentified
  source 1..144: mol_type = other RNA; note = Related to SZVX01000028.1; note = Dickeya sp.
atacggctctgccttaaatctgtgaggttgtttcgcctcgaggtatctaatgttagcatatcatgccatcgttcatcgaatggttattcgttgtaaaagtttgtcagctatacgttgcgtaaagtgattgggcagggtcgtaat

SEQ ID NO: 14718 - RNA, 145 nt, unidentified
  source 1..145: mol_type = other RNA; note = Related to CP055010.1; note = Klebsiella quasipneumoniae
gcacggctctgccttaaatctgtgaggttgtttcgcctcgaagtatctaatgtcagtacatcatgccaccgttcagccgaatggttactggtcgcaacaggttgttggctttacgttgcgcaaagtgattggacagagccgtaaa

SEQ ID NO: 14719 - RNA, 144 nt, Enterobacter sp.
  source 1..144: mol_type = other RNA; note = Related to CP012871.1
atacggctctgccttaaatctgtgaggttgtttcgcctcgaagtatcttatgttagtacatcacgctaccaatcagcggttagttacttgacgtaactgttaattggctaaagtttgcataaagtgattgggcggagccgtaaa

SEQ ID NO: 14720 - RNA, 147 nt, unidentified
  source 1..147: mol_type = other RNA; note = Related to PDDV01000006.1; note = Edwardsiella tarda
taatgcggcttcgtcttaaattttctaggttgtttcgccttgagagatttaatgtgagcacatcacgccccaatcagcggtcgttacagattgccagttggatagctctatacagatgcgaaaagtgattggacgaagccgcacatt

SEQ ID NO: 14721 - RNA, 146 nt, Citrobacter sp.
  source 1..146: mol_type = other RNA; note = Related to LR134204.1; note = Citrobacter koseri
ttacggctctgccttaaatctgcgaggtcgtttcgcctcgaattatctaacgtaagcaagatcacgcatccgccactctggatgaccgcttgtcgcactctctggattacctccggttgcgcaaggtgattgggcagagccgtaac

SEQ ID NO: 14722 - RNA, 143 nt, Escherichia coli
  source 1..143: mol_type = other RNA; note = Related to CP057087.1
ctacggctctgccttaaatttgtgaggttgtttcgcctcgaaggaactaatgttaggacatacgccaccgttcagtcgatggtaacgcttcttaactagtggtccgctaagtgatgcgcaaagtgattgggcagagccgaaac

SEQ ID NO: 14723 - RNA, 143 nt, unidentified
  source 1..143: mol_type = other RNA; note = Related to NZ_CAKLOR010000001.1; note = Klebsiella variicola
atacggctctgccttaaatttgtgaggttgtttcgcctcgaaggaactaatgttagcacacatgccatcgttcaggcgatggttactggtcgtaacttgatgtcagctatacgttgcgtaaagtgattgggcagagccgaaac

SEQ ID NO: 14724 - RNA, 145 nt, Proteus sp.
  source 1..145: mol_type = other RNA; note = Related to CP063440.1; note = Proteus mirabilis
atacggctccaccttaaatttgtgaggttgtttcgcctcgaaggaactaatgttaagatatatgccgttattctgctgtaaattgttatccatataacggtttttcagctatagattgcgtaaagtgattgggtggagccgtaat

SEQ ID NO: 14725 - RNA, 143 nt, unidentified
  source 1..143: mol_type = other RNA; note = Related to CP082141.1; note = Erwinia persicina
atacggctctgccttaaatttgtgaggttgtttcgcctcgaaggaactaatgttaggacacatgccaccgttcatccgatggttattgttcgcaacgggttgtcagctatacgttgcgcaaagtgattgggcagagccgtatt

SEQ ID NO: 14726 - RNA, 146 nt, unidentified
  source 1..146: mol_type = other RNA; note = Related to CP065673.1; note = Serratia plymuthica
gtacggctctgccttaaattttcaaagttgtttcgctttgaagtagtaaatgtgtggacatcatgcccctgtcagctgtgccgcgaaatgggctacaccagattggcgcgttggttttgcgtaaagtgattgggcagagccgatca

SEQ ID NO: 14727 - RNA, 145 nt, unidentified
  source 1..145: mol_type = other RNA; note = Related to CP065717.1; note = Serratia rubidaea
gtacggctctgccttaaattttcaaagttgtttcgctttgaagtagtaaacgagtggatatcatgccttatcagcgtcatgctaaatgggttacgccaggtagtatcgccgggttttgcgtagagtgattgggcagagccgtttg

SEQ ID NO: 14728 - RNA, 140 nt, unidentified
  source 1..140: mol_type = other RNA; note = Related to HG427573.1; note = Xenorhabdus bovienii
tactggctctgccttaaattttcaaagttgtttcgctttgaagtaaataatgtgaggttatcatgcctactgaacatggtggttacaccatgggttaacacgaaatttgtgtgcatagagtgattgggcagagccgcttt

SEQ ID NO: 14729 - RNA, 154 nt, unidentified
  source 1..154: mol_type = other RNA; note = Related to QRAU01000016.1; note = Serratia fonticola
agatggctccaccttaaattttcaaagttgtttcgctttgattttagcaaggttagtagaaatgccctgctccagggttgctgattgtccgcaaagttgcttcgtgagcttagcgtccttaggattgcgtaaggtgattgggtggagccactat

SEQ ID NO: 14730 - RNA, 154 nt, unidentified
  source 1..154: mol_type = other RNA; note = Related to NZ_CABHYS010000030.1; note = Yersinia mollaretii
aaaaggctccaccttaaattttcaaagttgtttcgctttgatttcaataacgtgagtagatatgccctgttaagggttgctgattgcccgctaagttgcttaataatcttagcgagcttatagtttgcgtaaggtgattgggtggagccaccct

SEQ ID NO: 14731 - RNA, 148 nt, unidentified
  source 1..148: mol_type = other RNA; note = Related to LKDX01000002.1; note = Pseudoalteromonas sp.
ctcggtttcgacccaaaatgtctgaagttgtaactgctttggatttggaacacaggctagcaaatgctgccggctatactcttatggctatctttatcgaattgctcgatgtcttaattggcgcaaggtgattgggtcgaaaccacta

SEQ ID NO: 14732 - RNA, 144 nt, unidentified
  source 1..144: mol_type = other RNA; note = Related to NZ_BLPI01000001.1; note = Agarivorans litoreus
cttggtttcaacccaaaatgtctgaagttgttactgcttcggacttggaactccgggtaacatatgctcggctacaactgtatctgatgttatcgatttgctcgatggctcaaatggcgcaaggtgattgggttgaaaccattt

SEQ ID NO: 14733 - RNA, 148 nt, Aeromonas salmonicida
  source 1..148: mol_type = other RNA; note = Related to NZ_CP051883.1
tacggtttcagccctaaatgtctgaagttgttactgctttggacttggaataccgggtaacacatgcccacggttcatctttatcggattgcctcgattcattcgattcgccgcgtggtggcgtaaggtgattgggctgaaaccactt

SEQ ID NO: 14734 - RNA, 144 nt, unidentified
  source 1..144: mol_type = other RNA; note = Related to NZ_CP033065.1; note = Pseudoalteromonas agarivorans
actggtttcgacccaaaatgtctgaagttgttaccgctttagattaggaactctgggtaggatatgcctgtgtgaactttatcagattgcttccaattatctgattggctctaagtgcgcaaagtgattgggttgaagccgtta

SEQ ID NO: 14735 - RNA, 151 nt, Vibrio sp.
  source 1..151: mol_type = other RNA; note = Related to VFNK01000001.1; note = Vibrio crassostreae
tgtggtttcaacccaaaatgtctgaagttgttactgctttggacttgtaactcagggtaactcatgcccgatgatctcgactttaccggatgcacatgatgtatacgggttgcctttaaggtggcgcaaggtgattgggttgaaaccatta

SEQ ID NO: 14736 - RNA, 147 nt, unidentified
  source 1..147: mol_type = other RNA; note = Related to NZ_PNCO02000001.1; note = Pseudoalteromonas galatheae
gttggcttcaacccaaaatgtctgaagttgttactgctttggacttggaaatcagggtagcatacgctcgatgtaagaggggcgctttactccaataatattggatgtgtcgcaagcctgcgcaaagtgattgggttgaagccacta

SEQ ID NO: 14737 - RNA, 147 nt, unidentified
  source 1..147: mol_type = other RNA; note = Related to NZ_JXXX01000040.1; note = Pseudoalteromonas piscicida
attggcttcaacccaaaatgtctgaagttgttactgctttggacttggaaatctgggtagcatacgctcgatgtaagaggggcgctttactccaataatattggatgtgttgcaagcctgcgcaaagtgattgggttgaagccacta

SEQ ID NO: 14738 - RNA, 141 nt, Vibrio parahaemolyticus
  source 1..141: mol_type = other RNA; note = Related to CP040101.1
aatggcttcggcccaaactgtctaaagttgttactgctttggactagggactctgagttccatatgccatcctgacgattggatgatatctctatgctgcatgtagcggaaaggcgcaaggtgattgggctgaagccaagc

SEQ ID NO: 14739 - RNA, 156 nt, unidentified
  source 1..156: mol_type = other RNA; note = Related to JACXAF010000008.1; note = Neiella sp.
atgggtttcaacccaaaatgtctgaagttgttactgctttggactaggaattccgagaacattatgctcattaaatctgcataagcccaagggggctgtcgtgattgatgggttgcttgccgcaaggtgcgcagggtgattgggttgaaactcgcc

SEQ ID NO: 14740 - RNA, 147 nt, Aeromonas sp.
  source 1..147: mol_type = other RNA; note = Related to NZ_LKJS01000005.1; note = Aeromonas veronii
tttgggctcaaccctaaatgtctgaggttgttactgctttggactaagatatgcgagtacattatgcctgctgaggcgtgctcaccgggtgagcgccaatttgcactggtcgctcaggtgcgtaaggtgattgggttgagcccactc

SEQ ID NO: 14741 - RNA, 134 nt, unidentified
  source 1..134: mol_type = other RNA; note = Related to NZ_VISO01000003.1; note = Rhizobium mongolense
cgaggcttgaccctctagttggtgccggtgaattcacggcaactcgctgaaacgtcagtacacatccgcgcgggccggtgcgctatgctcgatgcggtgacacgggaaggtacagagcgagggtcaagccttga

SEQ ID NO: 14742 - RNA, 130 nt, unidentified
  source 1..130: mol_type = other RNA; note = Related to NZ_JABFCN010000062.1; note = Rhizobium sophorae
aggcttggccctctaatttgtgccggtgaattcacggcaactcgctgagacgtcagtacacaaccgcgcgggccgggcgattgctcaaacggtgcaccacgggaatggtaaagagcgagggccaagcctt

SEQ ID NO: 14743 - RNA, 133 nt, unidentified
  source 1..133: mol_type = other RNA; note = Related to JAAXST010000004.1; note = Rhizobium laguerreae
tgaggcttgaccctctagtttgtgccggtgaattcacggcaactcgctgaaacgtcagtacacaatcgcgcgccggctctgcggcaacacacgcggttccacggaaaggtaaagagcgagggtcaagccttga

SEQ ID NO: 14744 - RNA, 127 nt, unidentified
  source 1..127: mol_type = other RNA; note = Related to JAHBRY010000004.1; note = Chelatococcus asaccharovorans
agacttggccctctagttggagccggtgtatccacggctgctcgacgaaaagttagtccataaggcgtgcgcggcggtccgtcgacgcgtactacctgcatcaggtaaggagcgagggccaagtctt

SEQ ID NO: 14745 - RNA, 131 nt, unidentified
  source 1..131: mol_type = other RNA; note = Related to JAGRAU010000490.1; note = Bdellovibrionales bacterium
agacttagccctctagttggagccggtgaattcacggctactggtaggaatgttactccataccgcgccgcgtgccgtggtgcgacaacgggtgatccacgttgagaagtaaagagcgagggctaagtctt

SEQ ID NO: 14746 - RNA, 128 nt, unidentified
  source 1..128: mol_type = other RNA; note = Related to NZ_KB890024.1; note = Hoeflea sp.
aggcttggccctctagttggagccgttgaatccacggctactcgctgaaatgtcatttcacaacgtcgtgccggccgggctgaccggaccgtgacccgttgaaaggtaaagagcgagggccaagcctt

SEQ ID NO: 14747 - RNA, 133 nt, unidentified
  source 1..133: mol_type = other RNA; note = Related to NZ_MYFQ01000014.1; note = Shinella sp.
agaagcttgaccctctaattggtaccggtgaatccacggtagctcgctataatgtcagtacacattcccgcgcgccggccgaataagccgtgcgatcggcgatgaaaggtaaagatcgagggtcaagcatttt

SEQ ID NO: 14748 - RNA, 131 nt, unidentified
  source 1..131: mol_type = other RNA; note = Related to NZ_CAKKMZ010000001.1; note = Rhizobium sp.
gtagcttgaccctctaattggtgccggtgaatccacggcaactcgctataacgtctgtacacatgcgcgcgggccggcgtgaccaaacaccggcaagcccaacgaaggtaaagatcgagggtcaagctttc

SEQ ID NO: 14749 - RNA, 134 nt, unidentified
  source 1..134: mol_type = other RNA; note = Related to NZ_AQQR01000002.1; note = Marinibacterium profundimaris
gaaggtccggctctctaatttccgctggtgaatccccggtggctcgctgaaacgttggtccaaaatcgcgacggtccgacggataatcgttccttagacgctgatgaaggtagagaacgagggttgggccttcc

SEQ ID NO: 14750 - RNA, 133 nt, unidentified
  source 1..133: mol_type = other RNA; note = Related to CP010623.1; note = Phaeobacter inhibens
caaggctcaactctctagtttgcgctggtgaatccccggcggctcgctgaaacgttagtcctaaatcgcggcggcgcggtgggttgtccactgtgtatcgtcgataaggtagagaacgagggttgagccttcc

SEQ ID NO: 14751 - RNA, 134 nt, unidentified
  source 1..134: mol_type = other RNA; note = Related to SMSI01000004.1; note = Pseudohoeflea suaedae
cgacgcttgctcctctacttggtgccgttgaatccacggcatatggctgaacgttcagtacacaaccgcgcgcgccggcgttatggccaaccggggtgctcgaatcgaggtaaagaacgaggagcaagctttgc

SEQ ID NO: 14752 - RNA, 126 nt, unidentified
  source 1..126: mol_type = other RNA; note = Related to JAGHRO010000004.1; note = Shimia sp.
gtgctcgaccctctacttggggctgtagaatccacggctgcttattgtaaagtcagtacacagttggttgactcctgtgcaatgtgagagtcaccgatgaaaagtaaagagcgagggtcgagccaa

SEQ ID NO: 14753 - RNA, 132 nt, unidentified
  source 1..132: mol_type = other RNA; note = Related to NZ_JFZB01000068.1; note = Paenirhodobacter enshiensis
gcagctcgaccctctacttggggctgttgaatccacggctgcttattagaatgtcagtacacaatcgcgcggcgcggtccgtgcgacatgtgtgatacccgatgcaaggtaaagagcgagggtcgagctgat

SEQ ID NO: 14754 - RNA, 133 nt, unidentified
  source 1..133: mol_type = other RNA; note = Related to FOXV01000005.1; note = Roseivivax halotolerans
ttagctcggccctctacttggggctgtagaatccacggctgcttattgaaatgtctatacataatcgcgcggccggtcggtgtgattcagccggatgcgtgtggataaggtaaagagcgagggtcgagctgat

SEQ ID NO: 14755 - RNA, 150 nt, unidentified
  source 1..150: mol_type = other RNA; note = Related to JAINWD010000002.1; note = Halomonas sp.
acaagcacccctcaagctttaactatgcagtgcaaccactgcaatcatccttaatgtaaggacatatgctactatggattacgttgagactgtaatacgcaatattacgaggtctcgcgaggcgtaaggtaaatagcaggggtgcttttt

SEQ ID NO: 14756 - RNA, 152 nt, Pseudomonas sp.
  source 1..152: mol_type = other RNA; note = Related to NZ_QBEO01000006.1; note = Pseudomonas aeruginosa
cgcagcacccctccaagctttaactatgcagtgctaccactgcaatcatcgttaatgtaaggatatatgcgactgtggatttcgatgggactaatgattcgcaatgttatgagtctcgcgaggcgtaaggtaaatagcggggggtgctgctt

SEQ ID NO: 14757 - RNA, 152 nt, Pseudomonas sp.
  source 1..152: mol_type = other RNA; note = Related to NZ_NEIO01000001.1
gcatgcacccctccaagctttaactatgcagtgcgaccactgcaatcattcgttaatgtaaggatatatgctactgtgagttacgttgagactatagttcgcaatgttatgagtctcgcgaggcgtaaggtaaatggcggggggtgctgctt

SEQ ID NO: 14758 - RNA, 152 nt, Pseudomonas sp.
  source 1..152: mol_type = other RNA; note = Related to NZ_CP009747.1; note = Pseudomonas parafulva
caaagcacccctccacgctttaactatgcagtgcgaccactgcaatcatcgttaatgttaggacatatgctactgtgagtgacgttgagactaatgattcggaatgttacgagtctcgcgaggcgtaaggtaaatggcggggggtgctactt

SEQ ID NO: 14759 - RNA, 151 nt, Pseudomonas sp.
  source 1..151: mol_type = other RNA; note = Related to NZ_CP075180.1; note = Pseudomonas lundensis
gagggcacccctccaagctttaactatgcagtgctaccactgcaatgatcgttaatgtaaggacatatgctactgtgagttacgctgagactatcgattcgcaatgttatgagtctcgcggggcgtaaggtaaatagcgggggtgccgctt

SEQ ID NO: 14760 - RNA, 149 nt, Pseudomonas sp.
  source 1..149: mol_type = other RNA; note = Related to NZ_JYKS01000054.1
acaggcacccctccaagctttaactatgcagtgctaccgctgcaatgatcgttaatgtaaggacatatgctactgagagttacgtcgaggcttcttcgcaatgttagcggtctcgcggggcgtaaggtgaatagcggggggtgccgctt

SEQ ID NO: 14761 - RNA, 150 nt, Pseudomonas sp.
  source 1..150: mol_type = other RNA; note = Related to RHQN01000003.1
ctaggcacccccaacagctttaactatgcagtgtgaccactgcaatgatctttgatgtatgcacaaatgccactcgggttacgccatgacccttggaggttacgttacggttcgtgatgggcgtaaggtaaatagcggggggtgccgctt

SEQ ID NO: 14762 - RNA, 155 nt, Pseudomonas sp.
  source 1..155: mol_type = other RNA; note = Related to CP013124.1; note = Pseudomonas mendocina
aagggctccccccacagctttaactatgcagtgctacctactgcaaaaatctgtcaagttcccacatacgccaccttagcggactcgcgacgttggcggcctattgatcgttacggttgactagggcgtaaggtaaaaggcagggggagcccttt

SEQ ID NO: 14763 - RNA, 154 nt, unidentified
  source 1..154: mol_type = other RNA; note = Related to JAAYGA010000118.1; note = Pseudomonadaceae bacterium
gggctcctgtccaaaagctttaactatgcagtgctacctactgcaaaaatctgttatgttttcccatatgctactttcgcgacttagcaagttggcgacctatcaatcattacggttgactcaggcgtaaggtaaaaggcgggagaggagccct

SEQ ID NO: 14764 - RNA, 155 nt, Pseudomonas sp.
  source 1..155: mol_type = other RNA; note = Related to NZ_SULN01000012.1; note = Pseudomonas rhizoryzae
ggggctcctccctacagctttaactatgcagtgctacctactgcaaaaatctttcatgtacacccatacgctgcactcgcggtatcgctatgcggcggcctttcgattgtagtggtcgacaagggcgtaaggtaaaaggcaagggaggagcccct

SEQ ID NO: 14765 - RNA, 117 nt, unidentified
  source 1..117: mol_type = other RNA; note = Related to JADMJM010000027.1; note = Hyphomonadaceae bacterium
aagcatcccgtccttctacgtccgctgttgatcctgcggcggaacagacaatgctcctctttaaggcccctgcacgagtgcaggggccttcgtaaggtacgagggacgggatgcctt

SEQ ID NO: 14766 - RNA, 117 nt, unidentified
  source 1..117: mol_type = other RNA; note = Related to JAEUMP010000020.1; note = Hyphomonadaceae bacterium
aagcatcccgtccttctacgtccgctgtcgatcctgcggcggaacagacaatgctccactttaaggcccctgcacgggtgcaggggccttcgtaaggtacgagggacgggatgcctt

SEQ ID NO: 14767 - RNA, 119 nt, unidentified
  source 1..119: mol_type = other RNA; note = Related to WGOB01000084.1; note = Alphaproteobacteria bacterium
aggcatccggtccttctacgtccgctgtcgatcctgcggcggaacaacaaatgtcgatctttaggagtacggggctgaagccccgtactcctagtaaggtacgagggacgggatgcctc

SEQ ID NO: 14768 - RNA, 118 nt, unidentified
  source 1..118: mol_type = other RNA; note = Related to JAEUMQ010000020.1; note = Hyphomonadaceae bacterium
gcgcatcccgtccttctacggccgctgtcgatcctgcggcggaacaaacaatgtctgtctttgacacacccgtcacaaggacgggtgtgcccgtaaagtacgagggacgggatgcagc

SEQ ID NO: 14769 - RNA, 121 nt, unidentified
  source 1..121: mol_type = other RNA; note = Related to WGNI01000003.1; note = Alphaproteobacteria bacterium
aggcatcccgcccttctacgtccgttgtcgatcctgcgacggaacaaacaatgtcggtctttagactacccgtgcgcaagcgcacgggtagtctggtaaggtacgagggacgggatgccgg

SEQ ID NO: 14770 - RNA, 114 nt, unidentified
  source 1..114: mol_type = other RNA; note = Related to JAEUMS010000023.1; note = Hyphomonadaceae bacterium
aagcatcctgtccttctacgtccgctgttgatcctgcggcggaataaataaggtgcgtctttaaacccagcgctaaagcgcgggtttggtaaggtacgagggacgggatgcctt

SEQ ID NO: 14771 - RNA, 114 nt, unidentified
  source 1..114: mol_type = other RNA; note = Related to DPWD01000203.1; note = Hyphomonadaceae bacterium
aagcatcccgtccttctaagtccgctgttgatcctgcggcggaataaataaggtgcgtctttaaacccagcgcttaagcgcgggtttggtaaggtacgagggacgggatgcctt

SEQ ID NO: 14772 - RNA, 113 nt, unidentified
  source 1..113: mol_type = other RNA; note = Related to NZ_SBJL01000001.1; note = Vitreimonas flagellata
aggcatctcgtccttctacgtctgctgttgatcctgcggcagaacaaacaacgtctgtctttatacccagccctgcgggcgggtatcgtaaggtacgagggacgggatgcctc

SEQ ID NO: 14773 - RNA, 118 nt, unidentified
  source 1..118: mol_type = other RNA; note = Related to JAGWZE010000002.1; note = Alphaproteobacteria bacterium
gagcatcccgcccgtctaagtccgctgtcgatcctgcggcggaaagtcaaacgcccatcttcaaggccatgggccaaggcccatggccttgcctaaggtacgaggggcgggatgctct

SEQ ID NO: 14774 - RNA, 122 nt, unidentified
  source 1..122: mol_type = other RNA; note = Related to JAHQVS010000037.1; note = Rhodobacteraceae bacterium
gcagccccgctcctctatgttcgctgttgatcctgcggcgtaagtagaattgcacacttttactagggggaccgcgtgaacgcggtccccctagtaattaaggtacgaggagtggggcatct

SEQ ID NO: 14775 - RNA, 118 nt, unidentified
  source 1..118: mol_type = other RNA; note = Related to JAHJSN010000196.1; note = Alphaproteobacteria bacterium
aggcatcctgcccttctacgtctgctgttgatcctgcggcagaaaaatcaaagtcttcttttaactatgggccgtaaacggcccatagttacataaggtacgaggggcaggatgcctg

SEQ ID NO: 14776 - RNA, 125 nt, unidentified
  source 1..125: mol_type = other RNA; note = Related to JAGWZH010000139.1; note = Alphaproteobacteria bacterium
gcgcgccgcccttctacgtccgctgttgttcctgcggcggaataaacaatgtctcactttacccaagggccgggcccgctcgcggccccggccctagggccccaaggtacgaggggcggcgtgtt

SEQ ID NO: 14777 - RNA, 184 nt, unidentified
  source 1..184: mol_type = other RNA; note = Related to JAGQQN010000044.1; note = Planctomycetaceae bacterium
aaacgacttccacttacctgtttgggctgttgatcctgcagcttgatcgtaaatgtatctttagtacgtcaactcagactctgcttgttcctaagtgtctctaaggcatcctgcggaaggcacctaatggtgctgtagtctttcagaagctgagatgttcggtaagagaaagtgggagcgtttc

SEQ ID NO: 14778 - RNA, 140 nt, unidentified
  source 1..140: mol_type = other RNA; note = Related to MDHN01000015.1; note = Alteromonas confluentis
ggagattgggtgcccatgatttacctttcttatgctatctgcgtaagtattaaaacaacggcatttttgccgctcatcgattactcttaaaggccattcgcccggcagaggtaaagataaaatcgggcacccaatcttat

SEQ ID NO: 14779 - RNA, 139 nt, unidentified
  source 1..139: mol_type = other RNA; note = Related to QJST01000027.1; note = Idiomarina fontislapidosi
atttgcgggtgaacagaatttactttccttatgcttatcagcataagagttaaataacggcatttttgccgtttatctgattactctaagtgttaagttgtcttatagaggtaaagagaaaatagttcacccgcagttt

SEQ ID NO: 14780 - RNA, 129 nt, Vibrio sp.
  source 1..129: mol_type = other RNA; note = Related to JTKH01000003.1; note = Vibrio renipiscarius
gcaagaggcgagagtttaactttctgctgttaatctgcggcggtcataagcatgtttctttttaccggtcctcagctagcctgatgatgccgttacgctgtacaagagaaaacaaaatcgcctcgttct

SEQ ID NO: 14781 - RNA, 128 nt, unidentified
  source 1..128: mol_type = other RNA; note = Related to NZ_LSNH01000001.1; note = Photobacterium sp.
caaagaggcgagagtttaactttctgctgttaatctgcggcggtcataagcatgtttctttttccggttgtcatctaaaatgttgcagccgttacgctgtataagagaaaacaaaatcgcctcgtttt

SEQ ID NO: 14782 - RNA, 131 nt, Vibrio parahaemolyticus
  source 1..131: mol_type = other RNA; note = Related to ABBBER010000002.1
cgaagaggcgaaaggtttaactttctgctgtctatctgcggtggtcatgaaaatgtttctttttccccgtgtatgtcacacttgtggcgtcatggtactcgatataagagaaaacaaaatcgcctcttcac

SEQ ID NO: 14783 - RNA, 137 nt, unidentified
  source 1..137: mol_type = other RNA; note = Related to NZ_CABHZI010000111.1; note = Yersinia proxima
cagcgcattttatcacaatttaactttctactgactatctgcggtagccataaacatgtaacttctgcatcggccgactttccgtatctcgcatgtttgccgaatttgcaaaagagaaaatagataaagtgcgctgt

SEQ ID NO: 14784 - RNA, 134 nt, Pseudomonas sp.
  source 1..134: mol_type = other RNA; note = Related to NZ_AWSQ01000001.1; note = Pseudomonas taeanensis
tcgggttcggggcacaatttaactttccactgactatatgcggtggccactgtaagggtagctttgcctgatcgtgctatacggttacgttatcgatggcgacggtaaaagagaaaatagccccgaaacccggt

SEQ ID NO: 14785 - RNA, 134 nt, Pseudomonas sp.
  source 1..134: mol_type = other RNA; note = Related to CP026558.1; note = Pseudomonas amygdali
ccgggttcggggcacaatttaactttccactgactatatgcggtggccactgcaagggtagctttgcctgatcgcgctatacggttacgttatcgatggcgacggtataagagaaaatagccccgaaacccggt

SEQ ID NO: 14786 - RNA, 136 nt, Pseudomonas fluorescens
  source 1..136: mol_type = other RNA; note = Related to CABVIC010000001.1
tcgggctcggggcaaaaatttaactttccactgactatatgcggtggccaatgcaagggttgctttgccttatcgctcttaacgatattgttaacgttggcgatgtgtagaagagaaaatagccccgaagctcggt

SEQ ID NO: 14787 - RNA, 135 nt, Pseudomonas sp.
  source 1..135: mol_type = other RNA; note = Related to NZ_CP054866.1; note = Pseudomonas chlororaphis
ccgggctcggggtacgatttaactttccactgactatatgcggtggccaatgcaagggtagctttgcctattcgcgcttaacgatgttgttaacgttggcgatgtgtaaaagagaaaatgaccccgagacccggt

SEQ ID NO: 14788 - RNA, 135 nt, Pseudomonas sp.
  source 1..135: mol_type = other RNA; note = Related to MOAT01000002.1; note = Pseudomonas protegens
ccggggtcggggcacgatttaactttccactgactatatgcggtggccagcgcaaggctagctttgcccgttacgcacttacgatgtcgacgaggttgccgatgtgtaaaagagaaaacagccccgacgcccggt

SEQ ID NO: 14789 - RNA, 137 nt, Pseudomonas sp.
  source 1..137: mol_type = other RNA; note = Related to NZ_FNBM01000007.1; note = Pseudomonas seleniipraecipitans
ccgggggcagggcccaatttaactttctgctgactatatgcggcggctaatgtaaggggggctttgcccgttacgttctcacagtgggttacgaattggcaatgtgggtaaaagagaaaattgccctgactcccggt

SEQ ID NO: 14790 - RNA, 136 nt, Pseudomonas sp.
  source 1..136: mol_type = other RNA; note = Related to AJXE01000010.1; note = Pseudomonas stutzeri
tcgggtgtaggggcacaatttaactttccactgactatatgcggtggccaagtaaagggttgctttgccgttacgcgctgacggtttctcacggttggcgacgtatgtaaaagagaaaatagtccctacactcggt

SEQ ID NO: 14791 - RNA, 136 nt, Pseudomonas sp.
  source 1..136: mol_type = other RNA; note = Related to NZ_QJUN01000007.1; note = Pseudomonas dryadis
ccgggtgtagggacgcaatttaactttccactgactatatgcggtggccagataaagggttgctttgccgttacgcgctaacgattactcatggttggcgacgtgtgtaaaagagaaaatagtccctgcactcggt

SEQ ID NO: 14792 - RNA, 137 nt, Pseudomonas fluorescens
  source 1..137: mol_type = other RNA; note = Related to NZ_CP075566.1
tcgggtgtagaggcacaatttaactttccactgactatatgcggtggccacatgaagggttcctttgccgttacgcgctgacgattactatgaggttggcgacgtgtgtaaaagagaaaatagcctctgcacccggt

SEQ ID NO: 14793 - RNA, 134 nt, Pseudomonas sp.
  source 1..134: mol_type = other RNA; note = Related to NZ_KE695189.1; note = Pseudomonas syringae
tccggatgtgggggagatttaactttctgctgttaatctgcggtggcttcgtaaaagtgtcttttgctctttcggcttttcagaggtttgaatggtctcgatggatataagagaaaacaccccacattccggac

SEQ ID NO: 14794 - RNA, 135 nt, Pseudomonas sp.
  source 1..135: mol_type = other RNA; note = Related to NZ_UUIZ01000014.1; note = Pseudomonas viridiflava
gcccgatgtggagggcgatttaacttactgctgactctctgcggcggacatcggaaggcttcttttgcccatcgatatttgttaacaatatgatctcgttacgttgtacaagagaaaacacctccacatcgggca

SEQ ID NO: 14795 - RNA, 138 nt, Pseudomonas sp.
  source 1..138: mol_type = other RNA; note = Related to JAEIKZ010000029.1; note = Pseudomonas corrugata
cccgacggtggggggcgatttaactttccgctgactgtctgcagtgggtaactcaacggttgcattctgcttgtttgagctcaatgttctggatgttgtcgctcagtgatacaagagaaaacatccccaccgtctggc

SEQ ID NO: 14796 - RNA, 135 nt, unidentified
  source 1..135: mol_type = other RNA; note = Related to SMFU01000008.1; note = Marinobacterium mangrovicola
cgagcgaggggctctgatttaactttccgctgactatctgcggcggtaattattacgtttcttttgcagctcggcctcctgggatgcgctgacgatgtgctgcagtgtataagagaaaattagccccttgttcgt

SEQ ID NO: 14797 - RNA, 129 nt, unidentified
  source 1..129: mol_type = other RNA; note = Related to DUBU01000004.1; note = Micavibrio sp.
cagcatatgagggcagagtttaactttccattgttaatctgcaatgtgtcaaaacaatgtttcttctggccgcacaacgcgtgtgtaagccgtaccgctgtacaagagaaaacagccctcgtatgcatt

SEQ ID NO: 14798 - RNA, 127 nt, unidentified
  source 1..127: mol_type = other RNA; note = Related to CP016868.1; note = Legionella pneumophila
cgtggcggtatgaattaaatttccattgtctatctgcgatggttataagtatgttatctattacgctcagtattattactaaactgttattgcagctaagggtataagaaaaattctaccgccaatt

SEQ ID NO: 14799 - RNA, 126 nt, Acinetobacter sp.
  source 1..126: mol_type = other RNA; note = Related to NZ_NHRP01000030.1
aagtctatcacttttaattaatttctattgtgtattcgcaatggtcaatttcaatgtcagtaacatcttcgagacttcatcgacgacagtgatttcgtcgtagaaaaattttaagtgatagatttt

SEQ ID NO: 14800 - RNA, 134 nt, Pseudomonas sp.
  source 1..134: mol_type = other RNA; note = Related to NZ_MOBC01000433.1; note = Pseudomonas brassicacearum
cttagcctccattcaggtattaaatagggttgttcaaatgcgacccgattcaaaaacgccacaagcaacggcgctgagctactcggagacgttatgcttaaaggaatatggtgaaatatgaatggaggcttttt

SEQ ID NO: 14801 - RNA, 134 nt, Pseudomonas sp.
  source 1..134: mol_type = other RNA; note = Related to NZ_LJRZ01000537.1
cctggcctccattcaggtattaaatagggttgttcaaatgcgacccgattcaaaaaagccacaagcaacggcactgagcaactctgcgacgttatgcttaaaggaatatggtgaaatatgaatggaggcttctt

SEQ ID NO: 14802 - RNA, 134 nt, Pseudomonas sp.
  source 1..134: mol_type = other RNA; note = Related to NZ_BCBD01000043.1
ctttgcctccattcaggtattaaatagggttgttcaaatgcgacccgattcaaaaaagccacaagcaacggcactcagcgactctgagacgttacgctcaaaggaatagggtgaaatatgaatggaggcttttt

SEQ ID NO: 14803 - RNA, 134 nt, Pseudomonas sp.
  source 1..134: mol_type = other RNA; note = Related to PVUL01000002.1; note = Pseudomonas simiae
cccagcctccattcaggtattaaatagggttgttcaaatgcgacccgattcaaaaaagccacaagcaacggcgatgagcgactctgagacgttatgcttaaaggaatagggtgaaatatgaatggaggcttctt

SEQ ID NO: 14804 - RNA, 134 nt, Pseudomonas sp.
  source 1..134: mol_type = other RNA; note = Related to NZ_LMGK01000001.1
cccagcctccattcaggtattaaatagggttgttcaaatgcgacccgattcaaaaaagctacaagcaacggcccttagcgacttcgggacgttatcttcaaaggaatagggtgaaatatgaatggaggcttttt

SEQ ID NO: 14805 - RNA, 133 nt, Pseudomonas fluorescens
  source 1..133: mol_type = other RNA; note = Related to SMCJ01000008.1
ctcggcctccattcgggtattaaatagggttgttcaaatgcgacccggctcaaaaatgctacaagcaacatccctttgcgactctggggaattatctttaaacgataaggtgaaatatgaatggaggtttttt

SEQ ID NO: 14806 - RNA, 134 nt, Pseudomonas sp.
  source 1..134: mol_type = other RNA; note = Related to NZ_BQIA01000029.1; note = Pseudomonas otitidis
aaaagcctccattcagatattaaatagggttgttcaaacgcgacccaactcaaaaatgccacaagcaacagctagcagaaatcatcctagcgattaccctaaatgagtaaggtgaaatagaatggaggcttttt

SEQ ID NO: 14807 - RNA, 134 nt, Pseudomonas sp.
  source 1..134: mol_type = other RNA; note = Related to NZ_NEIR01000012.1
tgttgcctccatccaggtattaaattgggttgttcaaacgcgaccctcctcgaaaatgctgtaagcaagatcgcgatgatgaactctgaacgatactctgaatgaatagggtgaaatatggatggaggcacttt

SEQ ID NO: 14808 - RNA, 133 nt, Pseudomonas sp.
  source 1..133: mol_type = other RNA; note = Related to NZ_JABWRZ020000002.1; note = Pseudomonas oryzicola
tctcgcctccatccaggtattaaattgggttgttcaaacgcgaccctacacgaaaacgctatacgcaacatcgcgatgataactctggacgatactctgaacgaatagggtgaaatatggatgggggcatcct

SEQ ID NO: 14809 - RNA, 133 nt, Pseudomonas sp.
  source 1..133: mol_type = other RNA; note = Related to JAAFOZ010000019.1; note = Pseudomonas savastanoi
acgtgccccatccaggtattaaattgggttgttcaaacgcgaccctacacgaaaatgctataagcaacatcgcgccggataactctggacgatactctgaaggaatagggtgaaatatgggtggggtcttttt

SEQ ID NO: 14810 - RNA, 136 nt, Pseudomonas sp.
  source 1..136: mol_type = other RNA; note = Related to NZ_CP081943.1
caacgcctccattcaagtattaaatcgggttgttcaaatgcgacccagctcagaaacgctataagcaacatcgcgatgtgaatcactcatgatgttatcttaaaggaataaggtgaaatatgaatggaggtttttt

SEQ ID NO: 14811 - RNA, 140 nt, Pseudomonas sp.
  source 1..140: mol_type = other RNA; note = Related to NZ_QYYB01000004.1
tagcgtccccgtccagggattaacatgggttgttcaaatgcgacctggctcaataatgtgacatgcaaaagcggtgggtcgacgagtgttattcggcggtccgcgatgatgtaaggtgaaactatggacggggacatctc

SEQ ID NO: 14812 - RNA, 145 nt, Pseudomonas sp.
  source 1..145: mol_type = other RNA; note = Related to NZ_LGLH01000057.1; note = Pseudomonas syringae
acacgcccccgtccgggattaaacttggttgatttaaatgcgaccataaggaacaatgctacaagcaactgctcagctatctgcaaatggttagctggatggataactcgtgaggaatagggtgaaatatggacgagggctcttt

SEQ ID NO: 14813 - RNA, 145 nt, Pseudomonas sp.
  source 1..145: mol_type = other RNA; note = Related to NZ_UWFG01000172.1; note = Pseudomonas viridiflava
gattgccctcgtccgggattaaacttggttgatttaaatgcgaccataaggaacaatgctacaagcaactgctcagcgttctgctaatggtccgctgaatggataactcgaagtgaatagggtgaaatatggacgagggctcttc

SEQ ID NO: 14814 - RNA, 145 nt, Pseudomonas sp.
  source 1..145: mol_type = other RNA; note = Related to NZ_CM001514.1; note = Pseudomonas synxantha
cattgccctcgtccgggattaaacttggttgatttaaatgcgaccataaggaacaatgctacaagcaactgctcagcgttctgctaatggtccgctgaatggataactcgaagtgaatagggtgaaatatggacgagggctcttc

SEQ ID NO: 14815 - RNA, 147 nt, Pseudomonas sp.
  source 1..147: mol_type = other RNA; note = Related to NZ_RWIM01000011.1
tgttgtccccgtccagggattaaaattggttgttttaaatgcgaccgtaaggaacaatgttacaagcaactgcctcagcgttacgctacattgacgccaagtggttaactgtaagtgaatagggtgaaatatggacgggggcatttc

SEQ ID NO: 14816 - RNA, 136 nt, Pseudomonas sp.
  source 1..136: mol_type = other RNA; note = Related to RBNR01000201.1; note = Pseudomonas syringae
gcatccctcgcttacgattaaactgggttgttcaaatgcgacccgattcagcaatgctagaagcaatagccgtggttacattggctttacgatgatacctatgagtctatagggtgaaacgaaggcgagggatgca

SEQ ID NO: 14817 - RNA, 141 nt, Pseudomonas sp.
  source 1..141: mol_type = other RNA; note = Related to NZ_WLYI01000015.1; note = Pseudomonas karstica
gtgcatcccttgcctacgattaaactgggttgttcaaatgcgacccgattcagcaatgctagaagcaacagccagtggttccattggctttacgatgatacctatgagtctatagggtgaaacgcaggcgagggatgcatt

SEQ ID NO: 14818 - RNA, 139 nt, Pseudomonas sp.
  source 1..139: mol_type = other RNA; note = Related to NZ_FNCT01000024.1; note = Pseudomonas benzenivorans
ccacctccacccgcaattaaataggttgttcaaatgcgacctgattcaaaaatgctataagcaactgccctacgctaatcctaatggttaacgtttggctacccttaagtctatagagtgaaatgcgggtgggggtttt

SEQ ID NO: 14819 - RNA, 141 nt, Pseudomonas fluorescens
  source 1..141: mol_type = other RNA; note = Related to NZ_CABVIZ010000005.1
tgtgctcccgcttgcgattaaactgggttgttcaaatgcgacccgattcagcaatgtagcaggctacagtcttgagttatatcttgagctgaatgttaagttatctatagtctatagggtgaagtgcaagcgggggcatct

SEQ ID NO: 14820 - RNA, 140 nt, Pseudomonas sp.
  source 1..140: mol_type = other RNA; note = Related to NZ_CP061723.1; note = Pseudomonas putida
atgcccctgcttgcgattaaactgggttgttaaaatgcgacccgattcaacaatgctgcaggctacagtccctgggttatctcaggtgctgaatgttaagttatctctagtctatagggtgaagtgcaagcgggggcatt

SEQ ID NO: 14821 - RNA, 140 nt, Pseudomonas sp.
  source 1..140: mol_type = other RNA; note = Related to LKBT01000034.1
cgccctcccctagttaaaatcagggttgttaaaatgcgacccaagtcaacaacgttacatgcgatcgcatcgacggttacgccaaagtggttgcgatttactcatcggtaatcggtaaagtaaactaggggcagggtctt

SEQ ID NO: 14822 - RNA, 140 nt, Pseudomonas sp.
  source 1..140: mol_type = other RNA; note = Related to NZ_AZQQ01000096.1; note = Pseudomonas mandelii
tttgctcgcccttagttaaactagggttgttaaaatgcgacccgagtcaaaaatgttacatgcgattgcctctacgtttactcaaagtggtagcaatttaattagcgctaatcggtaaagtaaactaagggcgagatcta

SEQ ID NO: 14823 - RNA, 147 nt, unidentified
  source 1..147: mol_type = other RNA; note = Related to RZHD01000010.1; note = Halomonas populi
tttggcctcctcttgggggtttatcttggcggagtcaaatgccgctgaatgccaataacgtctgctcaaatcgcagcgtccggtacgccattgagattgaaatgtaaattggtgatgcggaaagtgaaacccaagagaaggcctatg

SEQ ID NO: 14824 - RNA, 151 nt, unidentified
  source 1..151: mol_type = other RNA; note = Related to NZ_VCGW01000002.1; note = Marinobacter maritimus
tggcaacccggctcgtgattaatcttggcggttttaaatgctgcttaatgacaacgacgttaccacaaatcgcctctcagcacgttgctagcagcagctttgcaggcaaatttgagtaaagcgtaatgtgaaacttgagccgggcttttat

SEQ ID NO: 14825 - RNA, 139 nt, Cylindrospermum stagnale
  source 1..139: mol_type = other RNA; note = Related to NC_019757.1
tatcacttgcgggaataagtattgatttccgttgttgatcctgcgacggtgtatttgacggttagttttaacgacgcgcctagcgcgtttaattgcttttccttttccgagtaagcgagaatacacccgcgagtgatat

SEQ ID NO: 14826 - RNA, 144 nt, unidentified
  source 1..144: mol_type = other RNA; note = Related to LWHC01000033.1; note = Cyanobacterium sp. IPPAS B-1200
aatcacttgcgggataagttattgatttccattgttgatactgcgatggtgtattccaaggttagctttattacagtgtagtttcattgtaaattcatatattttatatatatgagtaaggtagaatacatccccaagtgattt

SEQ ID NO: 14827 - RNA, 141 nt, unidentified
  source 1..141: mol_type = other RNA; note = Related to NC_019779.1; note = Halothece sp.
agtcacttgcgggataagtattgatttccgttgttgatcctgcgacggtgtattttacggtcagctttacacaaccaatcgtggttttgttatttattggcttttcgcaagcataagcgagaatatacccgcaagtgatta

SEQ ID NO: 14828 - RNA, 155 nt, unidentified
  source 1..155: mol_type = other RNA; note = Related to PXPI01000109.1; note = Cyanobacteria bacterium SW_9_44_58
agtcacttgcgggataagtattgatttccgttgttgatcctgcgacggtgtattttactgttagctttacccgagtcgcgatcgtgtcgttcctttatatcatgcgttctatggctctctatgggaagaagttggaatgctcccgcaagtgattt

SEQ ID NO: 14829 - RNA, 158 nt, unidentified
  source 1..158: mol_type = other RNA; note = Related to RFIJ01001009.1; note = Bacteroidetes bacterium
agagatgcccggggtaggtattgatttccgttgttgatcctgcgacggttcaaaccaaggtttgctttatgcgactcccaggtctggggatggttgatgttcctagtttctggactcgacgccacgccataggtgagaatacacgccgggcatctctc

SEQ ID NO: 14830 - RNA, 130 nt, Microcoleus sp.
  source 1..130: mol_type = other RNA; note = Related to JACJPD010000044.1
ggatgtctatagagaaatattgattccgttgttgatcctgcgacggcgttatccaaagtcagctttacgctcgatcgaattaatccgattgcgatttgcagtaagcgagaatatattctgtagacatcct

SEQ ID NO: 14831 - RNA, 145 nt, Plectonema radiosum
  source 1..145: mol_type = other RNA; note = Related to NZ_JADEWL010000096.1
ttggatactcgtttaaatgattgattcccgctgttgatcctgcggcggtatatttttgaaggtcaacgtatatacacgtgatcattcttttaattacttagcgattgctagggtagtaagttggaatatacagcgagtatccaat

SEQ ID NO: 14832 - RNA, 144 nt, unidentified
  source 1..144: mol_type = other RNA; note = Related to QBMH01000079.1; note = Leptolyngbya sp.
ttaggtactcgtacaaaattgattcccgctgttgatcctgcggcggtaatgttctaaggggtagcatatatatgccctcgtccagtgactttccctggtgccttccagtgcatagtaggttggaatatgttgcgagtatctaac

SEQ ID NO: 14833 - RNA, 144 nt, Pseudanabaena sp.
  source 1..144: mol_type = other RNA; note = Related to NZ_JAAVJL010000001.1; note = Pseudanabaena yagii
ctaggtattcgtgcaaaattgattcccgttgttgatcctgcgacggtaatgcatcaaggggtacgatatatacctcgttataacactgttacgcaaccttacgaactgttagtagtaagttagaatctggtacgagtacttagc

SEQ ID NO: 14834 - RNA, 150 nt, unidentified
  source 1..150: mol_type = other RNA; note = Related to JAIPEW010000016.1; note = Clostridiales bacterium
gtatgtggagtttgggaattgattttcgttgttgatcctgcgacgaatatggatggttaactttacgtgctttttcatatctttggtatgcctgtttcatgttacttggctcagagatgcagtaagcagaattccaaactccatcatata

SEQ ID NO: 14835 - RNA, 161 nt, unidentified
  source 1..161: mol_type = other RNA; note = Related to JACDEG010000211.1; note = Pyrinomonadaceae bacterium
tcgggcgtttgcggaccctattgactccctgccgttgttactgcggcagatacgacaagggtagcctgatagctgccggtgatcgttcattgttcagcctcaatgctactcacagctttaccgtggaggcagtaagcagaataagttcgcggacgcccgcc

SEQ ID NO: 14836 - RNA, 149 nt, unidentified
  source 1..149: mol_type = other RNA; note = Related to MSXN01000018.1; note = Nitrospira sp.
gttgggcttgcgggatgtattgaagtctgttgttgatcctgcgacaggtcaaatcaaggggccatatatgcctcttgtgctttacgtgtatagcttacagtgtttacctcttgttcttggcagaaggcggaatacccgcaagccctcct

SEQ ID NO: 14837 - RNA, 141 nt, unidentified
  source 1..141: mol_type = other RNA; note = Related to JACPLU010000002.1; note = Parcubacteria group bacterium
aaaagggtgtgataacaattgattgccgttgtgtttcgcgacggatgagaaacggttccttttacttgctttatgtgcgtaatgttatggatatagacattaccgtgcttgcagaaagagaatttaaatcgcacccttttt

SEQ ID NO: 14838 - RNA, 149 nt, unidentified
  source 1..149: mol_type = other RNA; note = Related to DOHN01000106.1; note = Ruminiclostridium sp.
gtatatgggagtaaagtaattgatttttcgttgttgatcctgcgacgataatggaatggttagggcaacgtgccttactattatttatttacttcatctttattcctagctgctcctcggcaataagtagaattatactcccatatact

SEQ ID NO: 14839 - RNA, 147 nt, unidentified
  source 1..147: mol_type = other RNA; note = Related to JAFQLB010000113.1; note = Lachnospiraceae bacterium
aaacataggagaatttattttcgttagtgttaccgcaacgatgtatgacgatgttaggcagagatccgttctctgtttactcctctgtttagaaaacaatcagaatttattctgaatgttggataaggtagaattctcctatttttt

SEQ ID NO: 14840 - RNA, 145 nt, unidentified
  source 1..145: mol_type = other RNA; note = Related to JAKITL010000008.1; note = Gammaproteobacteria bacterium
ttgagcctccctcttctatatttgccgtcgatactgcggtagagaaatcaataccctcctttacgcatcctcggctactgggtgtcaatgtggctgaatatgcgattgcgttatcctgcgtaaagtgcgaggagggaggctcact

SEQ ID NO: 14841 - RNA, 157 nt, Nitrosomonas sp.
  source 1..157: mol_type = other RNA; note = Related to FOSP01000012.1
gggtgcgtccttcttctatatttgctgttgatcctgcggcagaaaaacacgatgtttcccattatgctcatttactcgttgtagtggtactgagcttattgttacttttagtatttatcttgcgtatttgcgtaaggtgcgaggaaggatgcgctca

SEQ ID NO: 14842 - RNA, 138 nt, unidentified
  source 1..138: mol_type = other RNA; note = Related to JABIUT010001148.1; note = Candidatus Scalindua sp.
aatgcccccactctctaaatttgctgttgatcctgcggcagaaaacagcgtagttatttcttacgactgtgttacgttatgttatgattgttattactttagtgttgccttgtataaagaatgagggtgggggtgttc

SEQ ID NO: 14843 - RNA, 153 nt, unidentified
  source 1..153: mol_type = other RNA; note = Related to CP066225.1; note = Planctomycetes bacterium
ataagcccctagatcttcagtatggccgtcgatcccgcggctacccattgtaatgttcttctatatgcgttacgacgatcatcaatattcgctacgtcattatgttgtgtcgttgcgtcgttggcaaaaggaaagatgatctaggggcttttt

SEQ ID NO: 14844 - RNA, 164 nt, unidentified
  source 1..164: mol_type = other RNA; note = Related to JAFLKZ010000048.1; note = Campylobacteraceae bacterium
caagagatactttatacattctatatttgctgtgcacctgcggcagacaacaaaattgtttctaattaagcttaccttatgagtttctgattgtgatgcttagtgtcctaacttgtacgctttgaatcgcataataaaagtgtgattgataaagtatctctcta

SEQ ID NO: 14845 - RNA, 152 nt, unidentified
  source 1..152: mol_type = other RNA; note = Related to MIBX01000109.1; note = Sulfurimonas sp.
acgggatgctttacgtattctatatttgctgttgttcctgcggcagacaacaaaaatgttctttattaatagattgtgaactcttaaaaatctgttaacttatctttatatactagtttgattataaagtgcgattagtgaagcatcccaat

SEQ ID NO: 14846 - RNA, 151 nt, unidentified
  source 1..151: mol_type = other RNA; note = Related to JAGBOM010000008.1; note = Opitutales bacterium
aaatgcttcccctttctatcttccgaggcgttcctgcttcgttatattcaaagttcttccttatggtatatcgattgattactattgttgaataatattacaatattatctatcgtccaatctatataaagagcgaaaggggaagcacctc

SEQ ID NO: 14847 - RNA, 141 nt, unidentified
  source 1..141: mol_type = other RNA; note = Related to NZ_BEWN01000005.1; note = Gluconobacter frateurii
aggcttacaggcagaattgttgtccggcttcgagacatatgtaccaatgttaggagagctcttgtgcttccctgatacttattgcggtttgtctgttttaatcagatcgcccattgttcgcgtaggagtgcctgtaagctt

SEQ ID NO: 14848 - RNA, 141 nt, unidentified
  source 1..141: mol_type = other RNA; note = Related to SAQI01000010.1; note = Mesorhizobium sp.
aggcttacaggcagatttgttgtccggcttcgagacatatgtaccaatgtcaggaggtctcttgtgcttccttgacacttattgcgggttatccgtttcgttcagattgcccgatattcgcgtaggagtgcctgtaagcct

SEQ ID NO: 14849 - RNA, 148 nt, unidentified
  source 1..148: mol_type = other RNA; note = Related to CP060244.1; note = Entomobacter blattae
cggcttacaggcagaattgttgtccggattcgagacatatgtaccaatgccaagctacgcttgtgcttctttaacacttattgcgggttaaacatttcgtttgtttaaatagcccgtatgttcatcgcgtaggagtgcctgtaagcct

SEQ ID NO: 14850 - RNA, 141 nt, unidentified
  source 1..141: mol_type = other RNA; note = Related to JAGHQS010000002.1; note = Qipengyuania flava
aggcttacaggcagaattgttgtccggattcgagacatatgtaccaatgccaggagggcacttgtgctcccttgacacttattgcggtttgaacattttgttcaagttgcccgatgattgcgtaggagtgcctgtaagcct

SEQ ID NO: 14851 - RNA, 140 nt, unidentified
  source 1..140: mol_type = other RNA; note = Related to JAINWB010000007.1; note = Thalassospira xiamenensis
tggcttacaggcagaattgttgtccggtttcgagacatatgtaccaatttcaggagggcttttgtgcttcctggatacttattgcgggctattcgtgtgtttagattactcgatgtacgcgtaggagtgcctgtaagcct

SEQ ID NO: 14852 - RNA, 141 nt, unidentified
  source 1..141: mol_type = other RNA; note = Related to JADGDA010000026.1; note = Alphaproteobacteria bacterium
aggcttacaggcagaattgttgtccggatttcgagacatatgtaccaatgctggggagaggtttgtgctcccttgacacttattgcccgagctgtttgtgatctatgggctgaatgttcgcgtgggagtgcctgtaagccc

SEQ ID NO: 14853 - RNA, 146 nt, unidentified
  source 1..146: mol_type = other RNA; note = Related to NZ_QAYR01000012.1; note = Rhizobium pusense
aggcttacaggcagaattgttgtccggtttcgagacatatgtaccaatgcaaggggagtgtttgtgcttcctacgtttccaatgcctgcatgatttctatgggattacgccggcttataccttcgcgtaagagtgcctgtaagccg

SEQ ID NO: 14854 - RNA, 147 nt, unidentified
  source 1..147: mol_type = other RNA; note = Related to JADOUL010000002.1; note = Labrenzia sp.
aggcttacaggcagaattgttgtcttgcttcgaggcatatgtatcaaggtcaggagagcggttgtgcttcctgatgcctattatggccttatcggtatcgtgaatattgatcaatgagccaattcgcataagagtgcctgtaagcct

SEQ ID NO: 14855 - RNA, 142 nt, unidentified
  source 1..142: mol_type = other RNA; note = Related to NZ_JACICD010000010.1; note = Angulomicrobium tetraedrale
tggcttacgggcagaattgttgtccggtttcgagacatatgtaccaatgccaggggagcgcttgtgctaccatggaacgtattgccgatttgggcggaatggcttgtcggcgtgacgatcgcgtaagagtgcccgtaagcct

SEQ ID NO: 14856 - RNA, 138 nt, unidentified
  source 1..138: mol_type = other RNA; note = Related to NCFD01000067.1; note = Acidocella sp.
aagtttacaggcagaattgttgtccggtttcgagacatatgtaccaatgtcagatggacgtttgtgctacctgatgttcttattgcacaatgtatatcttattatactatgtgatcgcgtaggagtgcctgtaagctt

SEQ ID NO: 14857 - RNA, 139 nt, unidentified
  source 1..139: mol_type = other RNA; note = Related to JAFKKU010000016.1; note = Hyphomicrobiales bacterium
cagcttgcgggcagatttgttgtccggattcgagacatatgtgaccatgccaggaaagcgcttgtgctaccctgcgtcttaatgcttggcatctataaatcgaggtgcttggcgtacgcgtaagagtgcccgcaagctt

SEQ ID NO: 14858 - RNA, 143 nt, unidentified
  source 1..143: mol_type = other RNA; note = Related to JACKIO010000012.1; note = Rhodospirillales bacterium
ggacttgcaggcagacttgttgtccgggttcgagacatatgaagaaacgtcaggagggcatttgtgcttccctgatgcttattgcggtccgattatatgcaatgtttaacgcaccgtgatcgcgtaggagtgcctgcaagtcc

SEQ ID NO: 14859 - RNA, 138 nt, unidentified
  source 1..138: mol_type = other RNA; note = Related to JABGZD010000203.1; note = Proteobacteria bacterium
ggacttgcaggcagacttgttgtccgggttcgagacatatgatgcaatgtcaggagagcgcttgtgcttccccgatacttattgcggtatgaatgaacgaatgattcgccgtaatcgcgtaggagtgcctgcaagtcc

SEQ ID NO: 14860 - RNA, 145 nt, unidentified
  source 1..145: mol_type = other RNA; note = Related to VYFW01000066.1; note = Gammaproteobacteria bacterium
ggacttgcaggtagatttgttgtccgggttcgagacatatgattcaatgtcaggaaagcgcttttgctgccctgattcctattccgactttactcgtcaagagttttgtcgaactgcgtgattgcgtaggagtgcctgcaagtcc

SEQ ID NO: 14861 - RNA, 144 nt, unidentified
  source 1..144: mol_type = other RNA; note = Related to NZ_QWGA01000003.1; note = Henriciella algicola
gagcttgcgggtagatttgttgtccggattcgagacatatgaagaaatgcgggggaacatctgtgcttccctgaaccatactgcggcatactgtgtgctgtgttacggtgatcgtcgtgatcgcgtatgagtgcccgcaagcct

SEQ ID NO: 14862 - RNA, 140 nt, unidentified
  source 1..140: mol_type = other RNA; note = Related to NZ_BARJ01000009.1; note = Gluconobacter oxydans
tgacttgtaggtagacttgttgtccggtttcgagacatatgaaccaacgtcaggagtgcacttgtgcttccctgagacttattgcggttaatacgatttaatctatattctccgtttcgcgtaggagtacctacaagtca

SEQ ID NO: 14863 - RNA, 144 nt, unidentified
  source 1..144: mol_type = other RNA; note = Related to NWSX01000001.1; note = Rhizobium sp.
gggcttgcaggcagacttgttgtccggattcgagacataagattcaacgctagggggcctcttgtgcttccctggtccatattgcggttactggacctgcctattggttcatcgccgtgctcgcgtaagagtgcctgcaagtcc

SEQ ID NO: 14864 - RNA, 130 nt, unidentified
  source 1..130: mol_type = other RNA; note = Related to NZ_LT670818.1; note = Bradyrhizobium erythrophlei
aagcttacaggcagatttattatcgtgtttcgcgatatatgatccaaagtcaggcacgctgctccctatgatccatgattgaaacatatggcccatggcctatgcgacgcgtaggagtgcctgtaagcct

SEQ ID NO: 14865 - RNA, 128 nt, unidentified
  source 1..128: mol_type = other RNA; note = Related to JADPKY010000194.1; note = Bradyrhizobium sp.
aagcttacaggcagatttgttatcgtgtttcgcggtatatgaaccaatgtcagggacgctgctccctatacgatcctcgatgcatatggccaatggcccatgcgacgcgtaggagtgcctgtaagccc

SEQ ID NO: 14866 - RNA, 130 nt, unidentified
  source 1..130: mol_type = other RNA; note = Related to JACIHF010000027.1; note = Bradyrhizobium sp.
aagcttacaggcagattcgttgtcgtgtttcgcgatatatgattcgatgtcagggacgctgctccctgtgatccgtatgatatgtttcggcctatggcctgcgcgctcgcgtaggagtgcctgtaagcct

SEQ ID NO: 14867 - RNA, 130 nt, unidentified
  source 1..130: mol_type = other RNA; note = Related to FOUS01000020.1; note = Bradyrhizobium sp.
aagcttacaggcagatttgttatcgtgtttcgcgatatatgatccaacggcaggagcgctgctcctgagcgatgctcaatgatctccaggtatgatggcctgcgcggcgcgtaggagtgcctgtaagcca

SEQ ID NO: 14868 - RNA, 128 nt, unidentified
  source 1..128: mol_type = other RNA; note = Related to NZ_FYEH01000004.1; note = Arboricoccus pini
aagcttacaggcagatttgttatcgtgtttcgcgatatatgatccaatgtctcggacgctgctccctacaggctgctctatgtcagcatgatgtgatgcacacttcgcgtaggagtgcctgtaagcct

SEQ ID NO: 14869 - RNA, 132 nt, unidentified
  source 1..132: mol_type = other RNA; note = Related to NZ_AXAP01000106.1; note = Bradyrhizobium elkanii
aggcttacaggcagatttgttatcgtgcttcgcgatatatgattcaatgtccccggatgctgctccgagacgacgagctcgatgagtgcatggcgaaccacccatgcggcgcataagagtgcctgtaagcct

SEQ ID NO: 14870 - RNA, 132 nt, unidentified
  source 1..132: mol_type = other RNA; note = Related to JAFCMB010000001.1; note = Bradyrhizobium sp.
aggcttacaggcagacttgttgtctcgttattgaggcatatgaaccaatgttgagggctgtcgctcctcgacgctcctggacggcgcgctggtataattgcacgtcgtacgcataagagtgcctgtaagctc

SEQ ID NO: 14871 - RNA, 132 nt, unidentified
  source 1..132: mol_type = other RNA; note = Related to MEEX01000061.1; note = Phenylobacterium sp.
aggcttgcagacagacttgttgtctcgttattgaggcataagaaacaatgttggggacggtcgctcctcgacgctccttcagggacgcatcgtcgatgggccatgcgcacgcgtaagagtgtctgcaagccc

SEQ ID NO: 14872 - RNA, 126 nt, unidentified
  source 1..126: mol_type = other RNA; note = Related to NZ_JAENJN010000015.1; note = Brevundimonas diminuta
aggcccacaggcagacttgttgtcgcgttattgcggcatatgaaacaacgtcagggcgtcagccctatgacgctatacgcgccgatgcgattggtgctgatcatgcgtaggagtgcctgtgggccg

SEQ ID NO: 14873 - RNA, 143 nt, unidentified
  source 1..143: mol_type = other RNA; note = Related to NZ_CP054836.1; note = Oricola thermophila
ccgcttacaggcagaattgttatcgcgtatcgcgatataagaaacaatgtcaggagggaatcgcttcccgacgatccttaatgcctattcgtttgtgatgaatggacgaaaactgggtatcgcataggagtgcctgtaagcat

SEQ ID NO: 14874 - RNA, 139 nt, unidentified
  source 1..139: mol_type = other RNA; note = Related to PBKC01000100.1; note = Rhodospirillaceae bacterium
gggcttacaggcagatttgttatcgcgtttcgcgatatatgacttgctgtcaggaggcgttgcttcccgacgatccttaatgcgcgttcaatcgatacgatgcgatgcgcatggtacgcttaagagtgcctgtaagcct

SEQ ID NO: 14875 - RNA, 135 nt, unidentified
  source 1..135: mol_type = other RNA; note = Related to NZ_JAGHQP010000025.1; note = Brevundimonas sp.
tggcttacaggcagatttatcgtcgagtttcgcgacgtatgaagcaatacgacttgtcgttgcttcctaataacccttaatctatttgcccatatgcgggcgactggatgatcgcataggagtgcctgtaagcct

SEQ ID NO: 14876 - RNA, 141 nt, unidentified
  source 1..141: mol_type = other RNA; note = Related to NZ_LT960614.1; note = Hartmannibacter diazotrophicus
cggcttacaggcagatttgtcgtcgtgtttcgcgacgtatgaagcaatactacttagagttgcttccctatgaacccttattgctatttgaccacttaatggcaaatgcacttgcgatcgcataggagtgcctgtaagccc

SEQ ID NO: 14877 - RNA, 139 nt, unidentified
  source 1..139: mol_type = other RNA; note = Related to NZ_PSRS01000004.1; note = Bradyrhizobium sp.
gagcttacaggcagatttattgttgcgctatcgcaacataagaccgaaggtcagaggccaatgcttcctgactgcagaattatgcacgttcaatgcggaatacgaaatcgcatgatcgctaaggagtgcctgtaagctc

SEQ ID NO: 14878 - RNA, 135 nt, unidentified
  source 1..135: mol_type = other RNA; note = Related to NZ_CP085136.1; note = Lichenihabitans sp.
aggcttacaggcagacttgttatcacgtctcgtgatatatgaaccaatgtgacccaatgtttgctcaccgaggggcgatacgatcgatcaatcgatgggcgatccgtgcctacgcgtaggagtgcctgtaagccg

SEQ ID NO: 14879 - RNA, 135 nt, unidentified
  source 1..135: mol_type = other RNA; note = Related to NZ_LABZ01000002.1; note = Methylobacterium tarhaniae
cggcttacaggcagatttgttatcgcgtatcgcgatatatgaaacaatgtcaggcggcgtttgctctccgactgacgatcatggatatgggacattatgggctgatggcctacgcataggagtgcctgtaagccg

SEQ ID NO: 14880 - RNA, 143 nt, unidentified
  source 1..143: mol_type = other RNA; note = Related to SDGU01000027.1; note = Chlorobaculum sp.
ttgcttacaggcagatttgttgttgtgcttcgcaacataattatagacgtaagggggttttgctccttttcgtatccttattgcacggcgttcaatgttcgctgtcagttgttctgaggtcgcataggagtgcctgtaagcaa

SEQ ID NO: 14881 - RNA, 136 nt, unidentified
  source 1..136: mol_type = other RNA; note = Related to NZ_LNYU01000023.1; note = Legionella santicrucis
aagcttatgaacagatttgctatcgtgtttcgcgatatattcatccaatgttggatgctttgctttcattacgcttttaaagcagcagcaattagtaaatatacactagttatcgcataagagtgttcataagcta

SEQ ID NO: 14882 - RNA, 137 nt, unidentified
  source 1..137: mol_type = other RNA; note = Related to NZ_CP014691.1; note = Neoasaia chiangmaiensis
aggcttacaggcagagttgttatcgcgtatcgcgatataagacatcgatgttgggcagtgatgcttccaactacccttattgcagctgcaaagctgagcggacgatcgatcggtcgcataggagtgcctgtaagccg

SEQ ID NO: 14883 - RNA, 138 nt, unidentified
  source 1..138: mol_type = other RNA; note = Related to AP018498.1; note = Altererythrobacter sp.
aggcttacaggcagagttgttatcgcgcatcgcgatataagacaccgatgttaggcagtgatgcttccatctacccttattgcagcatttccgctgagcggacgatctgatcgtacgcataggagtgcctgtaagccg

SEQ ID NO: 14884 - RNA, 138 nt, unidentified
  source 1..138: mol_type = other RNA; note = Related to NZ_NISJ01000021.1; note = Sphingopyxis witflariensis
aggcttacaggcagagttgttatcgcgcatcgcgatataagacaccgatgttaggcagtgatgcttccatctacccttattgcagctttacggctgagcggacgatccgatcgaacgcataggagtgcctgtaagccg

SEQ ID NO: 14885 - RNA, 139 nt, unidentified
  source 1..139: mol_type = other RNA; note = Related to NZ_CP046252.1; note = Sphingobium sp.
aggcttacaggcagagttgttatcgagaatcgcgatataagacaccgatgttgggcagtgatgctctccatctacccctaatgcagctttaccgctgagcggacgatctgatcgaacgcataggagtgcctgtaagcca

SEQ ID NO: 14886 - RNA, 138 nt, unidentified
  source 1..138: mol_type = other RNA; note = Related to JAACTB010000013.1; note = Erythrobacter sp.
cggcttacaggcagagttattatcgcgcatcgcgatatacgacaacgatgttgggcagcgatgctcccattgagaaactttgtgtaactgaccgttatagaacgttcgtgacgaacgcataggagtgcctgtaagcca

SEQ ID NO: 14887 - RNA, 140 nt, unidentified
  source 1..140: mol_type = other RNA; note = Related to CP030050.1; note = Bradyrhizobium arachidis
gggcttacgggcagagttgttatcgcgcatcgcgatataagacaaagatgccaaatctcgattgcttcctgagcaatcgtaatgcgacgagtgtttgaccagtgaatgctcggtgatcgcataggagtgcctgtaagccc

SEQ ID NO: 14888 - RNA, 141 nt, unidentified
  source 1..141: mol_type = other RNA; note = Related to JAKSYA010000167.1; note = Methylobacterium sp.
tggcttgcaggtagagttgttatcgcgtatcgcgatataagataaggatgttaggaggcgattgcttcccgtattccattattgcgctttcatgatggtccattatgggtcgtcatctcgcatatgagtacctgcaagctt

SEQ ID NO: 14889 - RNA, 140 nt, unidentified
  source 1..140: mol_type = other RNA; note = Related to NZ_FOTK01000017.1; note = Methylobacterium pseudosasicola
aagcttgcaggcagagttgttatcgcgcatcgcgatataagctaagaatgtcaggaggcgattgcttcccatgaccccttattgcagatctatgatccgcatcactgacgaccataccgcataagagtgcctgcaagctt

SEQ ID NO: 14890 - RNA, 142 nt, unidentified
  source 1..142: mol_type = other RNA; note = Related to NZ_VDDA01000005.1; note = Methylobacterium terricola
aagcttgcaggcagagttgttatcgcgccatcgcgatataagagaacgatgccgggaggtgattgcttcctatggcgtcttaatgcataaaaatgatcagacggtatgagcgatcgtatcgcataggagtgcctgcaagccc

SEQ ID NO: 14891 - RNA, 144 nt, unidentified
  source 1..144: mol_type = other RNA; note = Related to JAGWBW010000022.1; note = Candidatus Latescibacteria bacterium
tggcttacaggcagaactgtatcgcgtatcgcgataaaagataaaatgttaggatgtgttgttgcttcgtccaattctttaatgcggcattttcgttgttgttgtgtttgtgtgtgtgtttcgcataggagtgcctgtaagccg

SEQ ID NO: 14892 - RNA, 144 nt, unidentified
  source 1..144: mol_type = other RNA; note = Related to VXMB01000009.1; note = Gemmatimonadetes bacterium
cggcttacaggcagaatgctatcgcgcatcgcgatacaagacgaaacggtgggatgtgagtacgccgcttttcctttctgcgattcaatgtctgtctgttgcattgatcggatcggcagttcgcgtaggagtgcctgtaagcca

SEQ ID NO: 14893 - RNA, 142 nt, unidentified
  source 1..142: mol_type = other RNA; note = Related to JAIPDZ010000080.1; note = Deltaproteobacteria bacterium
tggcccatggacagatttattattgtgtatcgcaatataagaaaccaatgtcagggcggattgcttcctggctatcctttttgcagtgtattttatgtcccagtatactgtgttactctcgcataagagtgtccatgggcca

SEQ ID NO: 14894 - RNA, 141 nt, unidentified
  source 1..141: mol_type = other RNA; note = Related to JAGGXD010000009.1; note = Bacteroidales bacterium
tggctcatggatagatttgttattgtgtatcgcaatatacgaaaccaaagtcaggatggattgcttcctggttatcctttatgcagtatatctgaatgtccactgtatactgtattatcgcataagagtgtccatgagcca

SEQ ID NO: 14895 - RNA, 144 nt, unidentified
  source 1..144: mol_type = other RNA; note = Related to JAKISH010000034.1; note = Gammaproteobacteria bacterium
tgactcatggatagatttattattgtgtatcgcaatataagaaactaatgtcaggatggatttgcttcctgataatcctttacgcagtgtgccagtatgacttggttacagtgttacatatcgcataagagtatccatgagtca

SEQ ID NO: 14896 - RNA, 144 nt, unidentified
  source 1..144: mol_type = other RNA; note = Related to JAFDMD010000032.1; note = Deltaproteobacteria bacterium
tggctcatagtcagatttattattgcgcatcgcaatataagaaataatgccaggttgtgttacttcctgacaatcattcgttgctattggttatgttataatatagttatattacatttctcgcataggagtgtctatgagccg

SEQ ID NO: 14897 - RNA, 126 nt, unidentified
  source 1..126: mol_type = other RNA; note = Related to JAGQKD010000345.1; note = Nitrospira sp.
gggtctataggcagatttgttattgcgtatcgcagtataagaaaccaatgtcgggaggcttgcttcctcgactcccttgtagcacttggctaggtgtcacctgtgcaaaagagtgcctatagaccc

SEQ ID NO: 14898 - RNA, 146 nt, unidentified
  source 1..146: mol_type = other RNA; note = Related to JAGNKF010000015.1; note = Syntrophaceae bacterium
aggcttataggcagatttattgttgtgaatcgcaaccataagaaaccaatgtcaccggggttcgcttacccagtatactattggctacgtatctttagatgtgtatgcatatagctaccttctcgcaaaagagtgcctataagcct

SEQ ID NO: 14899 - RNA, 148 nt, unidentified
  source 1..148: mol_type = other RNA; note = Related to NZ_CP087999.1; note = Geomonas sp.
cggcttgtaggcagatttgttattgtgaatcgcaatataagaaaccaaagtcagggagtgttgcttcccacagacgtaccgcactttggctactagcattatgactttacgttacttgacgttatcgcttaagagtgcctacgagccg

SEQ ID NO: 14900 - RNA, 126 nt, unidentified
  source 1..126: mol_type = other RNA; note = Related to NZ_FNJI01000013.1; note = Desulforhopalus singaporensis
tgacttataggtagatttgttattgtgtttcgcaattatatgaaaacaaaggtaggtagacttgcctccctgatccttcgcttatcctgtgagatcctgatctcgcataagagttcctataagtca

SEQ ID NO: 14901 - RNA, 142 nt, unidentified
  source 1..142: mol_type = other RNA; note = Related to DNTK01000207.1; note = Bacteroidales bacterium
tggctcataaacagatttgttattgtgtttcgcaatatatgaaactaatgtttagactcattagtgcttattaatctttatgcttattaatatttataatgtttttaagcttttctagacgcataggagtgtttatgagcct

SEQ ID NO: 14902 - RNA, 135 nt, unidentified
  source 1..135: mol_type = other RNA; note = Related to BLXY01000001.1; note = Geomonas paludis
cggcttataggcagatttattgatgcgtttcgcattcataagaaaccaatgttacgttggcagttgttgcttttcggtgtcccatagtattacgtactgttcgcctattactcgcataagagtgcctataagccg

SEQ ID NO: 14903 - RNA, 140 nt, unidentified
  source 1..140: mol_type = other RNA; note = Related to NZ_LVJN01000020.1; note = Proposed Magnetofaba australis
aggcttacaggcagacttgttatcatgtttcgtgatatacgtaaccaatgttaggtaggctttgctccctaacgttccttctgtcagcttggcgtttcgctatgctgtgcaacgttccgcataggagtgcctgtaagcct

SEQ ID NO: 14904 - RNA, 141 nt, unidentified
  source 1..141: mol_type = other RNA; note = Related to CP064988.1; note = Rhodospirillales bacterium
gggcttgcaagcagatttgttgtcgtgtctcgcgacataagatcgaacgtcagaggggattgctccccaggatgctcgaagcgcgcatagcgtcacgtaacggatagcctagcggtttcgcgtaagagtgcttgcaagccc

SEQ ID NO: 14905 - RNA, 147 nt, unidentified
  source 1..147: mol_type = other RNA; note = Related to JAKSYD010000289.1; note = Methylobacterium sp.
cggcttgcgggcagatttgttgtcgcgaatcgcggcataagacaacgatgtcagggggtacttgctcccaggcaacgatcctagaagagcatactcgatgacgcctaaagtaaatccgcggcgttgcataggagtgcccgcaagctt

SEQ ID NO: 14906 - RNA, 141 nt, unidentified
  source 1..141: mol_type = other RNA; note = Related to JAGQAF010000003.1; note = Ruegeria pomeroyi
gggcttacgggcagacttcctgctgcgcatcgcggcaaatgacaacaatggtaggcaggctgcttaccttcaggttcccttgcggtatcttccggttttccggtgtatcgccgacgctcgcataagagtgcccgtaagcac

SEQ ID NO: 14907 - RNA, 136 nt, unidentified
  source 1..136: mol_type = other RNA; note = Related to JAGIOQ010000002.1; note = Rhizobium leguminosarum
cagcttacgggcagacttcctgctgcgtatcgcggcaaatgacgacaatggtagccgtgctgctacctcaggttccttgcggtacttcggattatttgagtatcgcctacgctcgcataagagtgcccgtaagcat

SEQ ID NO: 14908 - RNA, 141 nt, unidentified
  source 1..141: mol_type = other RNA; note = Related to NZ_LZYE01000077.1; note = Acidithiobacillus caldus
tgccttacgggcagacttccggctgcgcatcgcggcaaatgacaacaatggtaggcgtgctgcttacgtctaacttcttttgcgatatttggagttctctatcatgtatcgcttactttcgcttaagagtgcccgtaagca

SEQ ID NO: 14909 - RNA, 140 nt, unidentified
  source 1..140: mol_type = other RNA; note = Related to NZ_SDEA01000026.1; note = Paracoccus luteus
atgcttacgggcagacttcctgccgcgcatcgcggcaaatgataacaatggtaggcaggctgcttaccttcaggttcccttgcggtgtttccggttttccggtgtatcgccgacgctcgcataagagtgcccgtaagcac

SEQ ID NO: 14910 - RNA, 145 nt, unidentified
  source 1..145: mol_type = other RNA; note = Related to JAGHRJ010000002.1; note = Labrenzia sp.
ttgcttacgggcagacttactgctgcgtatcgcggcaaatgacaacaacggtaggcagtctgctgtccatcggtctttctttgcgatttcatatggttatcctattgaaatcctgcaacttcgctcaaggagtgcccgtaagcgc

SEQ ID NO: 14911 - RNA, 143 nt, unidentified
  source 1..143: mol_type = other RNA; note = Related to NZ_JAAXDY010000025.1; note = Rhizobium leguminosarum
gtgcttacgggcagaattactactgcgcatcgcggtaaatgacaacaatggtaggcaggctgctgctcacctacggtcccttttgcatggccacggacaatatgatcgatgagccatcgacgcataggagtgcccgtaagcac

SEQ ID NO: 14912 - RNA, 143 nt, unidentified
  source 1..143: mol_type = other RNA; note = Related to JAHJTN010000036.1; note = Bacteroidetes bacterium
tggcttacgggcagacttcctgctgcgaatcgcggcaaatgacaaaaatggtaggcaggctgctgaccgaccatgatccctttgcaatcgttcggttatacctgatgattgacctgagatcgcgtaagagtgcccgtaagctc

SEQ ID NO: 14913 - RNA, 148 nt, unidentified
  source 1..148: mol_type = other RNA; note = Related to JAGRRC010000006.1; note = Ciceribacter sp.
gagcttgcggacagatttaatgtcgcgcatcgcgacatatgatccgaatggttggcactctgctttccatcagatttcttttgcggattttcgagttttcgaattttcgtatttgcttaccacatcgcataagagtgtccgcaagcta

SEQ ID NO: 14914 - RNA, 142 nt, unidentified
  source 1..142: mol_type = other RNA; note = Related to JAIERP010000170.1; note = Mycobacteriaceae bacterium
gagcttacgggcagaattggtgccgcgtttcgcggcatatgacaacaatggtaggcacgctgcttcccatatgaaaatctttgcggactttccgttcatctggaaaattcgctacacatcgcaaaagagtgcccgtaagctc

SEQ ID NO: 14915 - RNA, 135 nt, unidentified
  source 1..135: mol_type = other RNA; note = Related to NZ_ML660062.1; note = Denitrobaculum tricleocarpae
gagcttgcgggcagaattactgccgcgcaatcgcggcaaatgacaacaatggtaggcatgctgctttccgtccatgatccctttgcgaatatctatgaatattcggtcgtctcgcataagagtgcccgcaagctc

SEQ ID NO: 14916 - RNA, 141 nt, unidentified
  source 1..141: mol_type = other RNA; note = Related to JACKJA010000002.1; note = Rhodospirillales bacterium
aggcttgcgggcagacttcttgctgcgcatcgcggcaaatgacaacaacggtaggtgggctgctcatcaccgtgatccttttgcggacagtcctcatggaccatgtctcgccgattatcgcttaagagtgcccgcaagcct

SEQ ID NO: 14917 - RNA, 132 nt, unidentified
  source 1..132: mol_type = other RNA; note = Related to NC_013440.1; note = Haliangium ochraceum
aagcttacgggtagactttctgctgcgcatcgcggcaaatgaaaacaatggtagggcatgatgctctccgttgcatgtatctttgcggatctttattcgacattacagtcgcctaggagtacccgtaagcgt

SEQ ID NO: 14918 - RNA, 124 nt, unidentified
  source 1..124: mol_type = other RNA; note = Related to NZ_MZXU01000017.1; note = Bosea sp.
gtgcttacgggcagacttcctgctgcgtatcgcggcaaatgacaacaatgttaagcgggctgcttcccgttatagatcctttgcagatatctgccatagatcgcataagagtgcccgtaagcaa

SEQ ID NO: 14919 - RNA, 131 nt, unidentified
  source 1..131: mol_type = other RNA; note = Related to PDSV01000021.1; note = Gammaproteobacteria bacterium
gggcttacgggcagaattattatcgcgtatcgcgataagtgacaacaatactagaacctagtgcttaaaggtatcttaaaggacgaaaggaattaaaggattcgtcttcgcgtaagagtgtccgtaggcct

SEQ ID NO: 14920 - RNA, 121 nt, unidentified
  source 1..121: mol_type = other RNA; note = Related to JAFECG010000019.1; note = Proteobacteria bacterium
aagcttgtgagcagatttatgatcgcgtttcgcgatctatgacagaaatgtccagagtactgcctctacgctacaactctttatcgctcgcaacctcacgcagaggagtgctcacaagctt

SEQ ID NO: 14921 - RNA, 127 nt, unidentified
  source 1..127: mol_type = other RNA; note = Related to LOEV01000045.1; note = Alphaproteobacteria bacterium BRH_c36
aagcttgtgggcagacttatgatcgcgtttcgtcgatctatgacaacaatgttgggggcactgccctaatcggtgcttccttagtgcaactcggaaaacctcatcgcagaggagtgcccacaagctc

SEQ ID NO: 14922 - RNA, 153 nt, unidentified
  source 1..153: mol_type = other RNA; note = Related to PAIP01000075.1; note = Parvularcula sp.
gaacccacaggcagacttatcgtcgcgaatcgcggcgtatgaaaacaatgttggcgacgctgctcccaacgccatcccagtgctgtacagtgttgtccagcgttatcatggactgcacatctatgcgtatcgcaaaggagtgcctgtgggttt

SEQ ID NO: 14923 - RNA, 145 nt, unidentified
  source 1..145: mol_type = other RNA; note = Related to WVQY01000005.1; note = Ruegeria atlantica
gagcttgtgggcagaattatcgttgcgctatcgcgacgtgtgagatgaaacagcaggtgctgctatcatcaagacactttatgcattcgtagactattcgatgcaggctgatccgatgagatcgcataagagtgcccacaagctc

SEQ ID NO: 14924 - RNA, 131 nt, unidentified
  source 1..131: mol_type = other RNA; note = Related to NZ_FOSL01000011.1; note = Mesorhizobium albiziae
gggcttgcggatagattctgctgttgttgtttcggcgatagttgatatcaatgcacggcttactgcccgaccattccttacggactgtcctatgtggtccgacgccttggcgaacgagtatccgcaagccc

SEQ ID NO: 14925 - RNA, 131 nt, unidentified
  source 1..131: mol_type = other RNA; note = Related to JAHRFK010000006.1; note = Hoeflea sp.
tggcttgcggatagattctgctgttgttgtttcggcgatagttgatatcaatgcagggcttactgcccgaccattccttacggactgtccaatgttgtccgacgcttttgcaaacgagtatccgcaagcca

SEQ ID NO: 14926 - RNA, 130 nt, unidentified
  source 1..130: mol_type = other RNA; note = Related to JAIUHW010000003.1; note = Mesorhizobium sp.
tagcttgcggatagattctgctgttgttgtttcggcgatagttgatatcaatgcagggcttactgcctgaccattccttacggactgaccatattgtccgctgccttggcaaaagagtatccgcaagcct

SEQ ID NO: 14927 - RNA, 131 nt, unidentified
  source 1..131: mol_type = other RNA; note = Related to NZ_JACIFL010000022.1; note = Rhizobium sp.
aagcttgcggatagattctgctgttgttgtttcggcgatagttgatatcaatgcagggcttactgcctctacattccttccggactgctccacacggtccgacgctatggcgaacgagtatccgcaagccc

SEQ ID NO: 14928 - RNA, 132 nt, unidentified
  source 1..132: mol_type = other RNA; note = Related to NZ_WPHT01000004.1; note = Agrobacterium vitis
tggcttgcggatagattctgctgttgtgtttcgcgatagttgataccaatgcgcggggcattgcccgacgcattcctcacggactgtcatccgctggtccaccgaccttggcaaacgagtatccgcaagcct

SEQ ID NO: 14929 - RNA, 131 nt, unidentified
  source 1..131: mol_type = other RNA; note = Related to JAAMEU010000005.1; note = Agrobacterium rhizogenes
aggcttgcggatagattctgctgttgtgtttcgcgatagttgataccagtgcgcggggcattgccctacgcattccttacggactgttcacccatggtccgatgacttggcaaacgagtttccgcaagcct

SEQ ID NO: 14930 - RNA, 130 nt, unidentified
  source 1..130: mol_type = other RNA; note = Related to NZ_ANNO01000019.1; note = Pseudochrobactrum sp.
aggcttgcggatagattctgctgttgtgcttcgcgatagttgataccaatgcgcgggccattgcccatgcattccttacggactgttctcggatcgtccgataacttggcaaacgagtgtccgcaagccc

SEQ ID NO: 14931 - RNA, 131 nt, unidentified
  source 1..131: mol_type = other RNA; note = Related to NZ_AP023262.1; note = Mesorhizobium sp.
gtgcttgcggatagattctgctgttgttgtttcggcgatagttgatatcaatgcgcggggttctgcccgcacattccttacggactgtatacccatgtccgatgctctggcatacgagtatccgcaagcca

SEQ ID NO: 14932 - RNA, 129 nt, unidentified
  source 1..129: mol_type = other RNA; note = Related to JAJGNB010000034.1; note = Aurantimonas coralicida
tggcttgcggatagatttttctgttgtgcttcgcgacagttgactacatggctcgggggattgcccccgcgaccaccctgtgatcgttattcgagattatgcgtatggcgaacgagtatccgcaagcca

SEQ ID NO: 14933 - RNA, 129 nt, unidentified
  source 1..129: mol_type = other RNA; note = Related to NZ_VFVY01000001.1; note = Mesorhizobium sp.
cggcttgcggatagattttgctgttatgtatcgtgacagttgatattattgcaccaggcaatgcctgggcactccttccggattgcttcatgcgacccgatcgtatggcgtacgagtatccgcaagccc

SEQ ID NO: 14934 - RNA, 125 nt, unidentified
  source 1..125: mol_type = other RNA; note = Related to NWTG01000019.1; note = Bradyrhizobium sp.
cggcttgcggatagatttttctgttgtgcttcgcgacagttgatatgaatgccacgggtaatgcgcgctccttgcagatcgctatgatcggacgacacatctggcgtacgagtatccgcaggccg

SEQ ID NO: 14935 - RNA, 125 nt, unidentified
  source 1..125: mol_type = other RNA; note = Related to JAGKJI010000032.1; note = Bradyrhizobium sp.
cggcttgcggatagattttgctgttgtgcttcgcgacagttgatatgaatgcacgcgggaatgcgcgctccttgcagatcgctatgatcgtgcgaacaatctggcgtacgagtatccgcaagccg

SEQ ID NO: 14936 - RNA, 125 nt, unidentified
  source 1..125: mol_type = other RNA; note = Related to NZ_CP086136.1; note = Bradyrhizobium sp.
aggcttgcggatagattttgctgttgtgcttcgcgacagttgatatgaatgcgcgtaggaatgcgcgctccctgcagttcgctgcgactatgcgtccgatctggcgtacgagtatccgcaagcct

SEQ ID NO: 14937 - RNA, 138 nt, unidentified
  source 1..138: mol_type = other RNA; note = Related to RPJW01000006.1; note = Sinorhizobium medicae
cagctcgcggatagatttttctgtcgtgtttcgcgacggttgagtgcagtgccacggtcaatgctaattacagcatgggccggcaatggttaaaatcctatcgttatctgacgatcgccaacgagtatccgcgagcct

SEQ ID NO: 14938 - RNA, 137 nt, unidentified
  source 1..137: mol_type = other RNA; note = Related to JAAMCX010000003.1; note = Agrobacterium rhizogenes
ttgctcgcggatagatttttctgtcgtgtttcgcgacggttgattacactgtcacggtcaatgctgatcacagtatgggctgatatggtttaaatcctatcgttatctgacgatcgccaacgagtgtccgcgagcct

SEQ ID NO: 14939 - RNA, 138 nt, unidentified
  source 1..138: mol_type = other RNA; note = Related to NZ_VDMN01000001.1; note = Rhizobium smilacinae
ctgctcgcggatagatttttctgtcgtgtttcgcgatggttgactacgccgttacggtcaatgctgaatacagtacggaccgctatactgtaaaatcctatcgtcacctgacggtcgccaacgagtatccgcgagcct

SEQ ID NO: 14940 - RNA, 138 nt, unidentified
  source 1..138: mol_type = other RNA; note = Related to JACVAS010000003.1; note = Ensifer sp.
gagctcgcggatagatttttccgtcgtgtttcgcgacggttgagtgcgctgtggcggtgaatgctttccgagagtatgacccgacacggttcgaattctatcgttatctgacaatcgccaacgagtatccgcgagctt

SEQ ID NO: 14941 - RNA, 136 nt, unidentified
  source 1..136: mol_type = other RNA; note = Related to SADI02000019.1; note = Mesorhizobium sp.
ccgctcgcggatagatttttctgtcgtgcttcgcgacagttgaatgtactatgagggccgatgctttccacagcgtggacctcgacggaatgacctgatcaacatccgacaatcgcctacgagtatccgcgagcct

SEQ ID NO: 14942 - RNA, 132 nt, unidentified
  source 1..132: mol_type = other RNA; note = Related to VCHT01000005.1; note = Rhizobium sp.
gggcttgcggacagattttgttgccaagtttcatggcagttgaaaccattgttgggtgatttgcctgacgatacttacagacgatgcaatattggataattcctacgttcgcataagagtgtccgcaagcct

SEQ ID NO: 14943 - RNA, 131 nt, unidentified
  source 1..131: mol_type = other RNA; note = Related to CP050308.1; note = Rhizobium lusitanum
gggcttgcggacagattttgttgccaagtttcatggcagttgaaaacattgtcaggcagtttgcccgacgatacttccagatgatgggatttgtataatatctccgctcgcataagagtgtccgcaagcct

SEQ ID NO: 14944 - RNA, 131 nt, unidentified
  source 1..131: mol_type = other RNA; note = Related to NZ_KZ857258.1; note = Rhizobium grahamii
gggcttgcggacagattttgttgccaagtttcatggcagttgaaagcatggtcaggcggtttgcccgacaatacctacagatgatgcgctattggacaattcgtccttcgcaaaagagtgtccgcaagcct

SEQ ID NO: 14945 - RNA, 143 nt, unidentified
  source 1..143: mol_type = other RNA; note = Related to JACIGM010000003.1; note = Rhizobium mongolense
aggcttgcggatagattttggtgtcatggctcgtgacacttgaaaacaatgctgccggcaatgctgacaggttcctccgatcgctggtccgactgatacacacgggctatgcgcttcaatcgcatacgagtatccgcaagccc

SEQ ID NO: 14946 - RNA, 141 nt, unidentified
  source 1..141: mol_type = other RNA; note = Related to SIOG01000001.1; note = Rhizobium leguminosarum
aggcttgcggatagattttggtgtcgtgtgttcgtggcacttgaaagaaatgctgccagcaatgctgaacagttatccgcatgtccattcaatattggatatctactatgcgctacatcgcatacgagtatccgcaagcct

SEQ ID NO: 14947 - RNA, 142 nt, unidentified
  source 1..142: mol_type = other RNA; note = Related to NZ_JABEPP010000002.1; note = Enterovirga sp.
cggcttgcggatagattttgcggcgctgcttcggcgtcgttgaagtcaatgtctgggcgatgctccagcctttgaactgcctttcgaacaggcgaatgacaatgcatagaatgcgaatacgcgtacgagtatccgcaagcca

SEQ ID NO: 14948 - RNA, 137 nt, unidentified
  source 1..137: mol_type = other RNA; note = Related to NZ_LSKN01000098.1; note = Methylobacterium sp.
cgacttgcggatagatttttctacaatgtttcgttgtagttgaaaccatcgtggagccgactgctctccgaacactgaccgacattatatgatcccggcaaatatgcgcgaagacgcataagagtatccgcaagtcg

SEQ ID NO: 14949 - RNA, 143 nt, unidentified
  source 1..143: mol_type = other RNA; note = Related to JAAXSB010000004.1; note = Rhizobium laguerreae
atgcttgcggatagatttttctatgatgcttcgtcatagttgccatcgttgtggaggcgtttgctttcccgacttcctaatgattcgatttcggataatctaatatacgatttcgactttcgcataagagtatccgcaagcat

SEQ ID NO: 14950 - RNA, 136 nt, unidentified
  source 1..136: mol_type = other RNA; note = Related to NZ_CP015318.1; note = Mesorhizobium amorphae
aggcttgcggatagattttgctgtgatgattcgtcacagttgaaaccatcgtggagggttttgctctcccggtacctgacgactccgaatggggcctgcatgatctgcgaatgcgcaaacgagtatccgcaagccg

SEQ ID NO: 14951 - RNA, 144 nt, unidentified
  source 1..144: mol_type = other RNA; note = Related to VFVE01000003.1; note = Mesorhizobium sp.
cggcttgcggatagatttttctgtgggggttctccacagttgaaagcaagacggccttagtgcttcccgaagtatcccgacgagaagcagcatgtaacggtatgacgatgacacgcgaagtcgcgtaggagtatccgcaagccg

SEQ ID NO: 14952 - RNA, 138 nt, unidentified
  source 1..138: mol_type = other RNA; note = Related to CP015005.1; note = Aminobacter aminovorans
cggcttgcggatagatttttctgtgggggttctccacaggtgaaagcaagacggccttagtgcttcccgaagagggacgacgaggagcattacgttaagcgaccatacgctggatcgcgtaggagtatccgcaagcct

SEQ ID NO: 14953 - RNA, 139 nt, unidentified
  source 1..139: mol_type = other RNA; note = Related to JAIUGR010000007.1; note = Mesorhizobium sp.
cggcttgcggatagatttttctgtgggggatcttcacaggtgaaagcaagacggcctcagtgctacctgcagagtgccgacagtaacatgacgatatgggcgatactacgctgaatcgcttaggagtatccgcaagcca

SEQ ID NO: 14954 - RNA, 139 nt, unidentified
  source 1..139: mol_type = other RNA; note = Related to CAAF010000028.1; note = Mesorhizobium sp.
tggcttgcggatagatttttctgtgggggttctccacaggtgaaagcaatacggcctcaacgctacctgcagagagccgacgagagcatgacgatttgggcgataatacgctggatcgcgtaggagtatccgcaagcca

SEQ ID NO: 14955 - RNA, 144 nt, unidentified
  source 1..144: mol_type = other RNA; note = Related to NZ_JHQU01000117.1; note = Mesorhizobium mediterraneum
tggcttgcggatagatttttctgtgggggttcctcacaggtgaaaccaacacggccttagtgctgcccgaagagcgacgacgagaagcagcatataacggtataacggcaatacgcgaagtcgcgtaggagtatccgcaagcca

SEQ ID NO: 14956 - RNA, 136 nt, unidentified
  source 1..136: mol_type = other RNA; note = Related to SAKE01000022.1; note = Mesorhizobium sp.
cggcttgcggatagatttttctgtgggggttcctcacaggtgaaggcaagacggctctagtgcttcccggagaatgcgacgagggcgatacgttatggtccattatgctacatcgcataggagtatccgcaagccg

SEQ ID NO: 14957 - RNA, 137 nt, unidentified
  source 1..137: mol_type = other RNA; note = Related to RZTV01000003.1; note = Mesorhizobium sp.
cggcttgcggatagatttttctgtggggactctccacaggtgaaagcaacgtggctctagtgcttcccgaaggggcaacgaagagcaatacatcgagtctacaatacgctagatcgcataagagtatccgcaagtcc

SEQ ID NO: 14958 - RNA, 126 nt, unidentified
  source 1..126: mol_type = other RNA; note = Related to NZ_AJQB01000700.1; note = Bradyrhizobium japonicum
cggcttgcggacagatttttctatcatgcgttcgtgatagttgaaaccaatgcctgtcagaatgcctctgcaggtcccaacgcttaaggatccgctcgttgagcgccaaagagtgtccgcaagcca

SEQ ID NO: 14959 - RNA, 128 nt, unidentified
  source 1..128: mol_type = other RNA; note = Related to JACIHC010000005.1; note = Bradyrhizobium sp.
cggcttgcggacagatttttctatcatgcgttcgtgatagttgaaaccaatgcctgcgagaatgccactgcaggtcctaacgcttaagggtatccgctcgttgagcgccaaagagtgtccgcaagcca

SEQ ID NO: 14960 - RNA, 125 nt, unidentified
  source 1..125: mol_type = other RNA; note = Related to NZ_AP022641.1; note = Bradyrhizobium diazoefficiens
cggcttgcggacagatttttctatcatgtttcgtgatagttgaaaccaacgccggcaagactgcctcggcagatctcaacgctcaagacgatgctcgacgagcgcataagagtgtccgcaagcca

SEQ ID NO: 14961 - RNA, 125 nt, unidentified
  source 1..125: mol_type = other RNA; note = Related to NZ_JHQS01000008.1; note = Mesorhizobium amorphae
aggcttgcggacagattcttctatcatgtttcgtgataggtggaaaagttgctggggtggattgcccacctgcggtttctacaatttatcgatgtctcttcgtgcctaggagtgtccgcaagccg

SEQ ID NO: 14962 - RNA, 126 nt, unidentified
  source 1..126: mol_type = other RNA; note = Related to NZ_KB913026.1; note = Mesorhizobium loti
tggcttgcggacagatttttctatcatgattcgtgataggtgacgcaattgccgcagggattgcctacctgcggtttctacaagcttttcgtgacttgacgtgcgctaaagagtgtctgcaagcca

SEQ ID NO: 14963 - RNA, 127 nt, unidentified
  source 1..127: mol_type = other RNA; note = Related to JACIZA010000145.1; note = Phenylobacterium sp.
aagcttgcggatagatcttgctgccgtgcttcgcggcggttgatgggacgttccaatgaatgcccctacgacgattccaaatattacatgtaaacccacgggtttgccaaagagtatccgcaagcca

SEQ ID NO: 14964 - RNA, 129 nt, unidentified
  source 1..129: mol_type = other RNA; note = Related to JACJIU010000009.1; note = Rhizobium leguminosarum
tgatccgcaggcagatttttccgccatgtattgtggcggctataaagagcgtacagtgggattttccctacgcgccttatccttacggttcgctaaaccgtgttccgacgaaagagtgcttgcggatcg

SEQ ID NO: 14965 - RNA, 128 nt, unidentified
  source 1..128: mol_type = other RNA; note = Related to CP090117.1; note = Rhizobium leguminosarum
tgatccgcaggcagatttttccgccatgtattgtggcggctataaagagcgtacaacgggattttccctacgcgccttatacttacggttcgaaaaccgcgtattgacgaaagagtgcttgcggatcg

SEQ ID NO: 14966 - RNA, 128 nt, unidentified
  source 1..128: mol_type = other RNA; note = Related to NZ_CP054023.1; note = Rhizobium sp.
agatccgcaggcagatttttccgccatgcattgtggcggctataaagagcgtacagagggattttccctacgcaccttaagactgacggttaataaccgtgtgacgacgaaagagtgcttgcggatcg

SEQ ID NO: 14967 - RNA, 126 nt, unidentified
  source 1..126: mol_type = other RNA; note = Related to JAHIXO010000053.1; note = Alphaproteobacteria bacterium
cgatccgcaagcagattcttctgccatgcattgtggtgggtagaaagattgtacgctgggatttttcctacgcgccttacattcacggtaaaaaccgtgtgcttactaaagagtgcttgcggatca

SEQ ID NO: 14968 - RNA, 125 nt, unidentified
  source 1..125: mol_type = other RNA; note = Related to JAALYX010000005.1; note = Agrobacterium tumefaciens
tgatccgcaagcagatttttctgccatgtattgtggtgggtataaagattgtacgctgggatttatcctacgcgccttactataccgataataatcgtgtattactaaagagtgcttgcggatca

SEQ ID NO: 14969 - RNA, 128 nt, unidentified
  source 1..128: mol_type = other RNA; note = Related to NZ_RPKX01000022.1; note = Sinorhizobium meliloti
tgatccgcaagcagattcttctgccatgtattgtggcggctataaagaacgtagcctggggttttccccttacgtaccttgatattacggttaaatcaccgtgtgaacgaaagagtgcttgcggatca

SEQ ID NO: 14970 - RNA, 127 nt, unidentified
  source 1..127: mol_type = other RNA; note = Related to WISN01000076.1; note = Sinorhizobium meliloti
tgatccgcaagcagattcttctgccatgtattgtggcggctataaagaatgtagggcgggttttccaccttacgtaccttgatattacggttttaaaccgtgtgtacaaaagagtgcttgcggatcg

SEQ ID NO: 14971 - RNA, 126 nt, unidentified
  source 1..126: mol_type = other RNA; note = Related to NZ_FOPG01000001.1; note = Sulfitobacter dubius
cgatccgcaagtagatttttccgccattttttgtggcggctataaatattgtggccggggtttccctgagcaccttacagataatggtataacaccatgcgactgctaaagagtgcttgcggatca

SEQ ID NO: 14972 - RNA, 125 nt, unidentified
  source 1..125: mol_type = other RNA; note = Related to NZ_SAUW01000046.1; note = Sinirhodobacter populi
agatccgcaagcagatccttccatcatgcattgtgatggctatacagaacgtcagcgggctttcctcctgcgtatccttacattacggttaattaccgtgttgacgaaagagtgcttgcggatca

SEQ ID NO: 14973 - RNA, 135 nt, unidentified
  source 1..135: mol_type = other RNA; note = Related to NZ_QNQP01000022.1; note = Pelagivirga dicentrarchi
cagccttcgggcagattttgtcatcatgttcattgtgatggttggccgcaacgctggtcagatttgctcttcgagttcctttgcagttttacggattgtagaaatccttgcctgcgtaagagtgcccgaaggcta

SEQ ID NO: 14974 - RNA, 132 nt, unidentified
  source 1..132: mol_type = other RNA; note = Related to NZ_MNBL01000032.1; note = Nioella sediminis
tagcttgcgggtagattttgtcgtcgtgcttcatgacgtttgcacccattgttaggtgtgatgctctcttcgagttccctttagtcttcctcatgtaaacctctggtttgcctaaggagtactcgcaagcgc

SEQ ID NO: 14975 - RNA, 134 nt, unidentified
  source 1..134: mol_type = other RNA; note = Related to LMGC01000024.1; note = Ensifer sp.
aagcttgcgggcagatcttgtcgtcgcgcatcgcgacggttgctgacaatgtcaggcctgattgctccttccggagtacccttacgttcatctacgggaaatcccgtgacacgcatacgagtgcccgcaagcga

SEQ ID NO: 14976 - RNA, 134 nt, unidentified
  source 1..134: mol_type = other RNA; note = Related to AGVV01000148.1; note = Sinorhizobium meliloti
acgcttgcgggtagatcctgtcgtcgcgcatcgcgatggttgctgacaatgtcaggcctgattgctcctctcggagtacctttacgttattctacgggaaatcccgtgacacgcatacgagtacccgcaagcga

SEQ ID NO: 14977 - RNA, 134 nt, unidentified
  source 1..134: mol_type = other RNA; note = Related to NZ_SIQZ01000001.1; note = Rhizobium leguminosarum
aagcttgcgggtagatcctgtcgtcgcgcatcgcgacggttgctgacaatgtcaggcctgattgctccttccggagtacccttacgttcttctacgggaaatcccgtgacacgcatacgagtgcccgcaagcga

SEQ ID NO: 14978 - RNA, 143 nt, unidentified
  source 1..143: mol_type = other RNA; note = Related to NZ_CP053347.1; note = Sphingomonas sp.
aggaccgtgaacagaattttctgctgagtttcttggcagttgagaagtacgcgagcagcgcttgctgctatgatgcgatcatgatgatatgatgttatgatgatcgattgacgatgatatcgcataagagtgttcacggtcca

SEQ ID NO: 14979 - RNA, 142 nt, unidentified
  source 1..142: mol_type = other RNA; note = Related to NZ_BJVS01000002.1; note = Asaia bogorensis
aggatcgtgaacagatttttccgctgagtttctcggtggttgagaagtacgcaggcgccgcttgcttgtagtatacccaacaggaatacgatatcttaatgtcgaaatgactccgttatcgcaaaagagtgttcacgatccg

SEQ ID NO: 14980 - RNA, 142 nt, unidentified
  source 1..142: mol_type = other RNA; note = Related to NZ_CP019511.1; note = Sphingomonas sp.
agggccgtggatagattttactgccgagtttcttggcagctgagaagtatgcgagcatcgctcgctaatacgatccagcaatgatgatgcgctttgagttacacatgcgacaccgcgtcgcctaaggagtgtccacggcccg

SEQ ID NO: 14981 - RNA, 141 nt, unidentified
  source 1..141: mol_type = other RNA; note = Related to NZ_CP032570.1; note = Tsuneonella amylolytica
gcgaccgtgggcagaacgtactattgagaatctcgatagctgagtagtaagcaagcaacgctagcttctctgatgggactacttgaaatatttcttttacaatgtaacgcgacgttaccgcgtaggagtgcccacggtcac

SEQ ID NO: 14982 - RNA, 148 nt, unidentified
  source 1..148: mol_type = other RNA; note = Related to JADBDT010000001.1; note = Sphingopyxis sp.
gggcctgtgagcagaaccttctgctgaagtttcgcggcagttgaatagtatgcgaggatttcttgctactggataaatcgacaatgatgatccgaataggacaattaatgcggattcaccggaatcgcatgagagtgctcacaggccc

SEQ ID NO: 14983 - RNA, 122 nt, unidentified
  source 1..122: mol_type = other RNA; note = Related to LXYU01000002.1; note = Bartonella apis
aaactcacaggtagaagtgttatcttgtttcgagatatatttgttaatatcgacagctttgcttagctggtctacatgtgttactaagtaggtaagcttagtctaagagtacctgtgagttt

SEQ ID NO: 14984 - RNA, 136 nt, Vibrio parahaemolyticus
  source 1..136: mol_type = other RNA; note = Related to NZ_CP013248.1
tcgcttacgggcagaatttgagttgtgtatcgcaacttttgatataaatggcacgtgctatttgctacctttcggctattcgtctgatgaccaatagtttatcgttctacaatcgcgtaggagtgcccgtaagcaa

SEQ ID NO: 14985 - RNA, 137 nt, unidentified
  source 1..137: mol_type = other RNA; note = Related to NZ_CP058972.1; note = Pseudoalteromonas sp.
acgcttacgggcagatttggactgcgcatcgcagtttttgatttatatgttactttgtgtttgctaccttatcggctcgtccgggtatgttgacgattcatcctatcatcatttcgcaaaagagtgcccgtaagccc

SEQ ID NO: 14986 - RNA, 148 nt, unidentified
  source 1..148: mol_type = other RNA; note = Related to NZ_VJWL01000003.1; note = Aliidiomarina halalkaliphila
tggcttacgggcagaatttgggttgcgcatcgcaatctttgatacaaaagtctcgttacatttgctacctagcggtcgtccggtcggtttacatcgattcgactagtcgccctatgttttctcaaagcgtaggagtgcccgtaagcca

SEQ ID NO: 14987 - RNA, 130 nt, unidentified
  source 1..130: mol_type = other RNA; note = Related to JABWTP010000017.1; note = Photobacterium damselae
acgcttacgggcagattttgagttgtgtatcgcaacttttgatataaatgctgaactgcatttgcttaccttatggccatactggccaattactcgttaattcttaacgcataagagtgcccgtaagcat

SEQ ID NO: 14988 - RNA, 130 nt, Vibrio sp.
  source 1..130: mol_type = other RNA; note = Related to PIEV01000027.1; note = Vibrio splendidus
ctgcttacgggcagattttgagttgtgtatcgcaacttttgatacaaatgctgaactgtatttgcttaccttatggcctaaccggccagttactcgttaattcttaacgcataagagtgcccgtaagcac

SEQ ID NO: 14989 - RNA, 130 nt, unidentified
  source 1..130: mol_type = other RNA; note = Related to NZ_CP025583.1; note = Paracoccus sp.
gagcctgtgggcagattttaccgttgtgcttcgcgacggatgaaaccaccgtcaggtggatatgccctatcgggtttccttcagcatatcttatgtgacccttcggttgcctaggagtgcccatgggctc

SEQ ID NO: 14990 - RNA, 131 nt, unidentified
  source 1..131: mol_type = other RNA; note = Related to NZ_KE557310.1; note = Litoreibacter arenae
gagcgcgtgggcagattttaccgttgtgcgttcgcaacggatgaaaccactgttaggtggatatgccctatcgggtttccttcagcatattttatgtgacccttcggttgcctaagagtgcccacgggctc

SEQ ID NO: 14991 - RNA, 129 nt, unidentified
  source 1..129: mol_type = other RNA; note = Related to NZ_JABVAX010000004.1; note = Jannaschia marina
gagcctgcgggcagattttaccgctgtgtttcgcagtggatgaaaccatcgtcgggtggatatgctccttccgtcatctttgcatatcttatgagacacttacgtttgcataggagtgcccgcaggctc

SEQ ID NO: 14992 - RNA, 126 nt, Vibrio parahaemolyticus
  source 1..126: mol_type = other RNA; note = Related to AAXMXP010000003.1
cggtttacaggcagattttgttattgcgtttcgcaataagtgaaaataatgttggaaacaaatgctcatattatgagatgcatcgtgaaaatgggctgcgccgagccagagagtgcctgtaaacca

SEQ ID NO: 14993 - RNA, 126 nt, Vibrio sp.
  source 1..126: mol_type = other RNA; note = Related to NZ_JAHAMV010000022.1; note = Vibrio metschnikovii
aggcttacaggcagatttttttattgcgcttcgcgataagtgaaaaagacgttggaaacaaatgctcatattacggtaatgctcctgaaaatgggctgcgccgagcaaaggagtgcctgtaagctc

SEQ ID NO: 14994 - RNA, 129 nt, unidentified
  source 1..129: mol_type = other RNA; note = Related to NC_016026.1; note = Micavibrio sp.
aggcttacggacagaaatttgattgtgattcgcaatctatgaaaaaaatgttaggcaagtaagctgctacattcaacccgcatgctatgatgagggcaccccctcaggcaaaagagtgtccgtaagcca

SEQ ID NO: 14995 - RNA, 126 nt, unidentified
  source 1..126: mol_type = other RNA; note = Related to NZ_WTYR01000001.1; note = Alteriqipengyuania halimionae
agatctgcgggcagattttttgtagtgtttcgctacacgtgaaaagaatgtgagagggaattgcccctatcgtatacactttgcaatccttatgtgatgttatcgcgtaggagtgcccgcagatcg

SEQ ID NO: 14996 - RNA, 142 nt, unidentified
  source 1..142: mol_type = other RNA; note = Related to NZ_AUBC01000017.1; note = Salinarimonas rosea
gggttggcaggtagtttcgttgccgcgtttcgtggcatgagaaaaaatggccagggttcgtctgcttccttggcttctttatgcatctcggcttactcgatttgagatgcggactacatcgcataagagtacctgccaaccc

SEQ ID NO: 14997 - RNA, 140 nt, unidentified
  source 1..140: mol_type = other RNA; note = Related to JAAUTN010000370.1; note = Leptolyngbyaceae cyanobacterium SM1_4_3
ggacttgtaggcagattttatgtcatgtttcgtgacacttgaaacaaatgctgaaagcatagctttcagtgttttctatagcacttagcattagctatgtttggtgttcttcgcgttcgcaaaggagtgcctgcaagtcc

SEQ ID NO: 14998 - RNA, 140 nt, unidentified; identical to SEQ ID NO: 14997
  source 1..140: mol_type = other RNA; note = Related to JAAUQZ010000187.1; note = Leptolyngbyaceae cyanobacterium RM1_406_9

SEQ ID NO: 14999 - RNA, 136 nt, unidentified
  source 1..136: mol_type = other RNA; note = Related to JAAUUH010000063.1; note = Oscillatoriales cyanobacterium SM2_2_1
ggacttgtaggcaaattttgtgtcatgcttcgtgacacttgaaacaaatgctgctgccaatgctgacagtgaatccctatagtacataacatgcttatgataccttctgcgttcgcaaaggagtgcctgcaagtcc

SEQ ID NO: 15000 - RNA, 134 nt, unidentified
  source 1..134: mol_type = other RNA; note = Related to PHCH01000051.1; note = Betaproteobacteria bacterium HGW-Betaproteobacteria-4
gggcctacagacagaccttgtgccattgtttcgtggcatttgaaaaaaatgttgggggctatgctctcggcggtcctatccatgtgggtaaccttggggttcccatagcgtcgcgtaagagtgtctgtaggccc

SEQ ID NO: 15001 - RNA, 136 nt, unidentified
  source 1..136: mol_type = other RNA; note = Related to NCKJ01000107.1; note = Halothiobacillus sp.
gggcttgctgatagatttttttgccacgtatcgtggcaagtgaaactaacggcagaagctatgctgctgttatgctgattttcccttgagttgagcaaaggtttgcgcggtaacgcgtaggagtatctgcaggccc

SEQ ID NO: 15002 - RNA, 128 nt, unidentified
  source 1..128: mol_type = other RNA; note = Related to JYOD01000041.1; note = Burkholderiaceae bacterium 16
gggcttacaggcagattttttaccatgtttcgtggtaagtgacaccaatgtccggggctatgccctcgatatctctcataaatcgcatattacgccatatgcgcctgcaaaagagtgcctgtaagcct

SEQ ID NO: 15003 - RNA, 133 nt, unidentified
  source 1..133: mol_type = other RNA; note = Related to NKIH01000004.1; note = Burkholderiales bacterium PBB6
gggcttagtggcagattttttgccatgtttcgtggcatgtgaaagcaatgtctggagctatgctcctcgactatctcctctacagtgattccttgaggatctctgcgtctcgcgagagagtgccactaggtcc

SEQ ID NO: 15004 - RNA, 136 nt, unidentified
  source 1..136: mol_type = other RNA; note = Related to JACZJU010000112.1; note = Burkholderiales bacterium
gggcctacagacagaccttgtgctgcgtatcgtggcacgtgaaataaatggcgagcggtatgctgcctatcgcctccttgacgcatcgacaaggtaacttgtccctgttgaatcgcgtaagagtgcctgtaggccc

SEQ ID NO: 15005 - RNA, 134 nt, unidentified
  source 1..134: mol_type = other RNA; note = Related to SHXF01000114.1; note = Betaproteobacteria bacterium
gggcctacagacagaccttgtgctgcgcttcgtggcacgtgaaataaatggcgagcggtatgctgcccttcgcctctttgacggatcgacgatggacttgtcgcctggtatcgcgtaagagtgtctgtaggccc

SEQ ID NO: 15006 - RNA, 143 nt, unidentified
  source 1..143: mol_type = other RNA; note = Related to JADJFI010000002.1; note = Sulfuritalea sp.
gggcctacgggcagatcttgcgttatggaatcgtaacgcgtgaaattaatggcactaacgttttgctccttaccgtatcccttcacggtatgcaattattcagcatatccatttgcgggacgcataagagtgctcgtaggccc

SEQ ID NO: 15007 - RNA, 140 nt, unidentified
  source 1..140: mol_type = other RNA; note = Related to NZ_CP036357.1; note = Bordetella trematum
tggcccataagcagatttttttgccattgtttcgtggcaagtgacaacaacggcaggagcattgctcctgtacgccccataatccctagtagttgactgggatatatccattgcatacgcttaggagtgcttgtgggcca

SEQ ID NO: 15008 - RNA, 145 nt, unidentified
  source 1..145: mol_type = other RNA; note = Related to NZ_NEVN01000010.1; note = Bordetella sp.
gggcctacagacagattttttgccatcgtttcgtggcacgtgacaccaaaggcaggtgcattgctactatccatgtgcctgccacagtaaatccatgagtaaaatggaatgttctcagcattcgcataggagtgtctgtaggccc

SEQ ID NO: 15009 - RNA, 140 nt, unidentified
  source 1..140: mol_type = other RNA; note = Related to NEVU01000001.1; note = Bordetella sp.
cggcctacaggcagattttttgccatcgtttcgtggcatgtgacagtaatggcaggtgcattgctcctgtcggtcccattaagcctcatgagtccatcatgtggtgtctgcgcatagcgcataggagtgcctgtaggcca

SEQ ID NO: 15010 - RNA, 135 nt, unidentified
  source 1..135: mol_type = other RNA; note = Related to NZ_JACHGB010000002.1; note = Quisquiliibacterium transsilvanicum
cggcccctgggcagacgttttgtggcgtttcgccacaagtgcaatagctgggggaggcgttgcctccttactgctaccttatatctcgatttctcatgagatggtatgtcttcgcgtaagagtgcccaggggcca

SEQ ID NO: 15011 - RNA, 132 nt, unidentified
  source 1..132: mol_type = other RNA; note = Related to JAAZTX010000005.1; note = Acidithiobacillus ferriphilus
tggctcaccggcagactttgtgccatgtttcgtggcatttgaaacaaacgctaggaagtatgcttctcttcctagacgtgtctgatagtgccagagtgtcagtgtctatcgcgtaggagtgccggtgtgcct

SEQ ID NO: 15012 - RNA, 130 nt, unidentified
  source 1..130: mol_type = other RNA; note = Related to QHVH01000010.1; note = Blastocatellia bacterium AA13
agactcaccggtagattttgtgccatgcttcgtggcatttgaaacaaatgtgagagggtatgccgacatagccttgcgacttgctctctaccatgcaatatgactttcgcgtaggagtaccggtgggtcg

SEQ ID NO: 15013 - RNA, 136 nt, unidentified
  source 1..136: mol_type = other RNA; note = Related to JADBLS010000169.1; note = Chloroflexi bacterium
agactcaccggcagatcttgtgccatgcttcgtggcatttgaagcaaatgtgagagggtatgctgactcacagcgcatgtgagtatgcgcatatccgtttcgctgtatgacttcgcgtaggagtaccggtgagtcg

SEQ ID NO: 15014 - RNA, 148 nt, unidentified
  source 1..148: mol_type = other RNA; note = Related to CP047423.1; note = Candidatus Nitrospira kreftii
agacgcaccggtagattttgtgccatgtttcgtggcatttgaaagaaatgtaaaaggctatgctgctcaccgtgtgcgccacacttcgcatggggtgcagtgtatcttgtgtctcgcgtgtctatcgcgtaggagtaccggtgcgtca

SEQ ID NO: 15015 - RNA, 134 nt, unidentified
  source 1..134: mol_type = other RNA; note = Related to JACQSX010000029.1; note = Acidobacteria bacterium
ggacccactaggcagactttgtgccatgtttcgtggcatttgaaacaaacgttagatcctatgctgtcctcgccgtgaatggcgatggtcctcgcgactctctcgtgtcttcgcgaaggagtgccggtgggtca

SEQ ID NO: 15016 - RNA, 131 nt, unidentified
  source 1..131: mol_type = other RNA; note = Related to JADZCM010000017.1; note = Bryobacterales bacterium
ggacccactcggcagattttgtgccatgtttcgtggcatttgaagcaaaggtcgggtactatgctgattctcgtctgcagatacgctgtatctgctggtgactggcttcgctaaggagtgccggtgggtct

SEQ ID NO: 15017 - RNA, 128 nt, Achromobacter sp.
  source 1..128: mol_type = other RNA; note = Related to JABBJN010000001.1
ccgcccaccgacagagtttgtgccatgtttcgtggcacgtgaaacaaaatggccgaggctttgcccggttacgttaatgtaagcaacgccattagtggtctcaactgcgtaagagtgtcggtgggctc

SEQ ID NO: 15018 - RNA, 131 nt, unidentified
  source 1..131: mol_type = other RNA; note = Related to NZ_CP088952.1; note = Massilia sp.
agacctgcggtcagaccttgtgtcgcgattcgcgatacgtgtatcaattgtggggggctatgcttcctatcgatatcctagcagaagtagtcatggtgagccgtgcgccgccaaagagtttccgcaggtct

SEQ ID NO: 15019 - RNA, 130 nt, unidentified
  source 1..130: mol_type = other RNA; note = Related to NZ_CP080379.1; note = Massilia sp.
agacctacggaaagactttgtatcgcgattcgcgatacgtgtttcaattgcttagggctatgccctcgtcgatgtccttgcatgggagcttgactgttaccatgcgttgccaatgagtttccgtgggtct

SEQ ID NO: 15020 - RNA, 130 nt, unidentified
  source 1..130: mol_type = other RNA; note = Related to NZ_RXLQ01000009.1; note = Massilia atriviolacea
gggcctgcggtcagaccttgtaccgcgattcgcggtacgtgtatcaatggcttgggcctatgccctcgtcgatgtccttacatgattacttgaatgtagccatgcgtcgcaaatgagtgtccgcaggtcc

SEQ ID NO: 15021 - RNA, 135 nt, unidentified
  source 1..135: mol_type = other RNA; note = Related to JAHCDN010000001.1; note = Variovorax sp.
gagcttgcaaacagatttttcaccatgtttcgtggtgatggacaacgatagtaggggctatgcccgttattccttaatcgtgtgagttgagcccgacgacaagggtgtcttccgcataagagtgtttgcaagctc

SEQ ID NO: 15022 - RNA, 138 nt, unidentified
  source 1..138: mol_type = other RNA; note = Related to NZ_JAGSTT010000006.1; note = Burkholderia cenocepacia
ccgctttcgggcagaccttttgccatgtttcgtggcatgtgacaccaacggccgggacgttgctcctagtcgatatctcgccttaatagctgatcgcacgaatagcgattgcatacgcgtaagagtgcccgaaagccc

SEQ ID NO: 15023 - RNA, 124 nt, unidentified
  source 1..124: mol_type = other RNA; note = Related to FXAT01000001.1; note = Paraburkholderia susongensis
cagctcgcggatagattttttgccatgaatcatggcatgtgaaataaaagttccgggatttgctcctcggatttcctctgcattatccgaattgcgccgtttgcgtaagagtatccgcgagcca

SEQ ID NO: 15024 - RNA, 128 nt, unidentified
  source 1..128: mol_type = other RNA; note = Related to SMOD01000073.1; note = Paraburkholderia guartelaensis
cgactcgcggatagattttttgccatcgtttcatggcatgtgaagcaaatgttcgtggatatgctcctcggtatccctctatatattgcgagataatcgcagaaatgcgtaggagtatccgcgagtct

SEQ ID NO: 15025 - RNA, 132 nt, unidentified
  source 1..132: mol_type = other RNA; note = Related to NZ_LMNW01000004.1; note = Duganella sp.
ttgcttgcggatagattttttgccattgtttcatggcatgtgaaataaatgttcccgggatatgcccctcggtatccctctgtatcgtcatccgatagtagcgcgaggttgcgtaagagtatccgcaagcat

SEQ ID NO: 15026 - RNA, 122 nt, unidentified
  source 1..122: mol_type = other RNA; note = Related to QMFZ01000026.1; note = Burkholderia sp.
cgactcgcggatagattttttgccatgtttcatggcatgtgaagcaaatgttccgagatatgccctcggtatccctctgatactgcagatgcgcgccgatgcgtaggagtatccgcgagtct

SEQ ID NO: 15027 - RNA, 129 nt, unidentified
  source 1..129: mol_type = other RNA; note = Related to JAAOZT010000003.1; note = Glaciimonas immobilis
ggattcgcggatagattttttgccatgtttcatggcatgtgaaatgaatgtcccgggatatgccctcggtatccctctattaccgctatgatgcgcttgctatgttcgcataggagtatccgcgaattt

SEQ ID NO: 15028 - RNA, 129 nt, unidentified
  source 1..129: mol_type = other RNA; note = Related to NZ_JXQM01000003.1; note = Nitrosospira sp.
ggattcacggatagattttttgccatgtatcatggtatgtgaaacaaatgttccaggatatgctcctcggtatccctctgtaatactcgcagttcgcctggtgtaacgcataggagtatccgtgaatcc

SEQ ID NO: 15029 - RNA, 129 nt, unidentified
  source 1..129: mol_type = other RNA; note = Related to NCTK01000001.1; note = Ralstonia solanacearum
gggctcgcggatagattttttgccatgtttcatggcatgtgaaaataatgttacgagatatgccctcggataccctctatgcggcgccatgaagggccggctacgatgcgtaggagtatccgtgagccc

SEQ ID NO: 15030 - RNA, 137 nt, unidentified
  source 1..137: mol_type = other RNA; note = Related to JAJTWU010000005.1; note = Pelomonas sp.
ggactcgcggacagattttttgccatgcttcatggcatgtgaaacaaatgtccggggatatgctcctcggcgtccctcggtgttgcccggcatctcgctgagcaactgtgcggtcgcgtaagagtgtccgtgggtcc

SEQ ID NO: 15031 - RNA, 137 nt, unidentified
  source 1..137: mol_type = other RNA; note = Related to JAGREY010000320.1; note = Ottowia sp.
ggattcacggacagattttttgccatgcttcgtggtatgtgaaacacaggtccggggatatgctcctcggtgcccctcgaggttgccctgcgtcttgctgagcaactgtgcgatcgcgtaagagtgtccgtgggtcc

SEQ ID NO: 15032 - RNA, 136 nt, unidentified
  source 1..136: mol_type = other RNA; note = Related to WSYX01000004.1; note = Ralstonia solanacearum
ggactcacggacagattttttgccatgtttcatggcatgtgaaaagaatgtccggggatatgctcctcggcgtccctcgtgctgagctgcgagaagttgagcatctcggcgtccgcgtaagagtgtccgtgggtcc

SEQ ID NO: 15033 - RNA, 127 nt, unidentified
  source 1..127: mol_type = other RNA; note = Related to NZ_CP034395.1; note = Herbaspirillum seropedicae
cgactcgcggatagattttttaccatggttcatggtatgtgaaataaatgtctggaaatatgccctcggatgccctctatactgatatcgatagagtagcggattgcataagagtatccgcgagtct

SEQ ID NO: 15034 - RNA, 128 nt, unidentified
  source 1..128: mol_type = other RNA; note = Related to JAJFMU010000006.1; note = Xanthomonas campestris
ggactcgcggacagattttttgccatcgattcatggcatgtgaaatgaatgtctctagatatgccctcggatgttcctctgctggacgtacgtggtgcatggttgcgccagggagtgtccgcgagtcc

SEQ ID NO: 15035 - RNA, 128 nt, unidentified
  source 1..128: mol_type = other RNA; note = Related to FLTX01000075.1; note = Xanthomonas bromi
ggactcgcggacagattttttgccatcgcttcatggcatgtgaaaaaaatgtctcgagatatgccctcggatgtccctctgtcgtacgtacgtggtgcatggttgcgccagggagtgtccgcgagtcc

SEQ ID NO: 15036 - RNA, 126 nt, unidentified
  source 1..126: mol_type = other RNA; note = Related to NZ_CP092971.1; note = Xanthomonas oryzae
ggactcgcggacagattttttgccatcgtttcatggcatgtgaaaaaaatgtctcgagatatgccctcggatatcctctgtagtaagtacgtggtgcaagttgcgccagggagtgtccgcgagtcc

SEQ ID NO: 15037 - RNA, 131 nt, unidentified
  source 1..131: mol_type = other RNA; note = Related to DMZZ01000357.1; note = Comamonadaceae bacterium
ggactcgcaaacagattttttgccatgcttcatggcatgtgaaacaaacgtccgcaggaaatgctcctcggtgttcctcgccattcggccacgcgcgatccttgcgttcgcgtaggagtgtttgcgagtcc

SEQ ID NO: 15038 - RNA, 131 nt, unidentified
  source 1..131: mol_type = other RNA; note = Related to NZ_BCWR01000008.1; note = Hydrogenophaga taeniospiralis
ggactcgcagacagattttttgccatgcttcatggcatgtgaaacaaacgtccgcaggaaatgctcctcggtgttcctcgccattcggctactcgcgatcattgcgttcgcgtaggagtgtttgcgagtcc

SEQ ID NO: 15039 - RNA, 133 nt, unidentified
  source 1..133: mol_type = other RNA; note = Related to NZ_CP019236.1; note = Rhodoferax sp.
ggactcgcagacagattttttgccatgattcatggcatgtgaaagaaatgtccccgggaaatgctcctcggtatcctcgccgtattgcggcaatgcgcgtcccctgcgttcgcgtaagagtgtctgcgagtcc

SEQ ID NO: 15040 - RNA, 128 nt, Achromobacter sp.
  source 1..128: mol_type = other RNA; note = Related to CADIKS010000002.1; note = Achromobacter mucicolens
ttgcttgcgggcagaatttttgccatgtttcatggcaaaggaagggaacgttcgggatatatgccctcgtcgtactctattactccataatcatagcgttatcctgcttaaagagtgcccgcaagccc

SEQ ID NO: 15041 - RNA, 131 nt, unidentified
  source 1..131: mol_type = other RNA; note = Related to NZ_CXOO01000052.1; note = Limnohabitans sp.
ggaccggtcagcagaccttttgccgcgcctatcgcggtatgtgaaaaaaatgtgtggggctatgcccctacgcttccttacgttacgccctctcggttactctgcgttggcgtatgagtgctgtccggtcc

SEQ ID NO: 15042 - RNA, 131 nt, unidentified
  source 1..131: mol_type = other RNA; note = Related to NZ_LOJI01000040.1; note = Polynucleobacter yangtzensis
gaacctacaaatagaccttttgtcgtagattcgcgacatgtgaagtaaatgggtggggctatgcctcgtccgtaatcttttcttagttaactgtgcgtactaatgcgtcgcatatgagtatttgtaggttc

SEQ ID NO: 15043 - RNA, 137 nt, unidentified
  source 1..137: mol_type = other RNA; note = Related to NZ_AFWT01000016.1; note = Thiorhodococcus sp.
gggtctatagtcagaatttgtgccatgtcatcgtggtacgtgaaagccaatgtgcggggctatgctggcaccgccgtccttgttgctgaggcatgatgctaagctccttgtttacgcaaaagagtgtctatagaccc

SEQ ID NO: 15044 - RNA, 126 nt, unidentified
  source 1..126: mol_type = other RNA; note = Related to NZ_BCTR01000096.1; note = Sphingomonas azotifigens
aggctcgcggacagattttttgtcgcgtttcgcgacacgtgaagagaatgtgcgggagaattgctcctgcggtccatatgggcaatccctgagggtctacgcctgcgaaggagtgtccgcgagccg

SEQ ID NO: 15045 - RNA, 126 nt, unidentified
  source 1..126: mol_type = other RNA; note = Related to NZ_WOTA01000025.1; note = Acetobacter oeni
tggctcgcggacagattttttgtcgcgcttcgcgacacgtgaaaagaatgtgcgggagaattgctcctgcggtcatttcggcaatcccttagggccttcagcttgcgaaggagtgtccgcgagcca

SEQ ID NO: 15046 - RNA, 127 nt, unidentified
  source 1..127: mol_type = other RNA; note = Related to NZ_JAKREV010000015.1; note = Sphingomonas hankookensis
tggctcgcggacagattttttgtcgcgtttcgcgacacgtgaaaagaatgtgcgggagaattgctcctgcggtccatatgggcaatctctgagggccttacgcctgcgaaggagtgtccgcgagccg

SEQ ID NO: 15047 - RNA, 127 nt, unidentified
  source 1..127: mol_type = other RNA; note = Related to JACTGR010000001.1; note = Sphingomonas sp.
aggctcgcggacagattttttgtcgcgcttcgcgacacgtgaaaagaatgtgcgggagaattgctcctgcggtccattcgggcaatccctatgggtctttcgactgcgaaggagtgtccgcgagcca

SEQ ID NO: 15048 - RNA, 126 nt, unidentified
  source 1..126: mol_type = other RNA; note = Related to NZ_LR733875.1; note = Sphingomonas sp.
gggcttataggcagattttttatcgtgcttcgcgatacgtgaaactattgtccgagggattgctctggacgtgccttaatgtgcaatctttatgcgctatggctgcatacgagtgcctataagccc

SEQ ID NO: 15049 - RNA, 137 nt, unidentified
  source 1..137: mol_type = other RNA; note = Related to SCRQ01000059.1; note = Sinobacteraceae bacterium
aggcgggctggcagagtctgtgccatgtttcgtggcatgtgccaacaatgttgaaccctatgctcctatacctacacgtgaatccacgtgaccgggtatcggtgatgtgctgatcgcgaaagagtgccagcccgccg

SEQ ID NO: 15050 - RNA, 132 nt, Pseudomonas sp.
  source 1..132: mol_type = other RNA; note = Related to AP019411.1; note = Pseudomonas syringae
aggcttacaggcagattttttgccgcgtttcgtcggcatttgaaaccatcgtgtcggagattgcttcgacgtgactcacaatttggcgcttcggaataccctgccgggacgcatatgagtgcctgtaagctt

SEQ ID NO: 15051 - RNA, 131 nt, Pseudomonas sp.
  source 1..131: mol_type = other RNA; note = Related to NZ_CP060289.1; note = Pseudomonas protegens
aagcttacaggcagattttttgccgcgtttcgcggcatttgaaaccatcgtgtcggagattgcttctacgcgactcacaacttggcgcttcggaataccctgccgggacgcatatgagtgcctgtaagctt

SEQ ID NO: 15052 - RNA, 131 nt, Pseudomonas sp.
  source 1..131: mol_type = other RNA; note = Related to NZ_FYDY01000001.1
aagcttacaggcagattttttgccgcgtttcgcggcatttgaaaccatcgtgtcggagattgctcctacgcgactcacaagttggcggttcggaataccctgccgggacgcatttgagtgcctgtaagctt

SEQ ID NO: 15053 - RNA, 133 nt, Pseudomonas sp.
  source 1..133: mol_type = other RNA; note = Related to NZ_CP021132.1; note = Pseudomonas fragi
aagcttacaggcagattttttgtcgcggttcgcgacatttgaaactatcgtggcggacattgctccttcgcgactcacaactgggcggttcaggagtttccctgtcgggacgcatatgagtgcctgtaagctt

SEQ ID NO: 15054 - RNA, 131 nt, Pseudomonas sp.
  source 1..131: mol_type = other RNA; note = Related to JACYWS010000004.1; note = Pseudomonas syringae
aggcctacaggcagattttttaccacggatcgtggtatgtgaacctatcgtgtcggacattgctcctatgcgactcacaatggacgcgggatggaatctcctgacggacgcgtatgagtgcctgtaggccg

SEQ ID NO: 15055 - RNA, 133 nt, Pseudomonas fluorescens
  source 1..133: mol_type = other RNA; note = Related to CABVHP010000013.1
aggtttacaggcagatttttttaccacggttcgtggtacgtgaaaggttcgtgctggatattgcttctacgcgactcacaaagggatgcagggtgaataatcctgacggacgcatatgagtgcctgtaaacct

SEQ ID NO: 15056 - RNA, 131 nt, Pseudomonas fluorescens
  source 1..131: mol_type = other RNA; note = Related to CABVHX010000009.1
agccttacagacagattttttgccgcggatcgcggcagttgaaactatcgtgtcggagattgcttctacgcgactcacagttttacgccatgatgaatatccggcggacgcatatgagtgtctgtaaggct

SEQ ID NO: 15057 - RNA, 133 nt, Pseudomonas sp.
  source 1..133: mol_type = other RNA; note = Related to NZ_JACAOZ010000012.1; note = Pseudomonas edaphica
aggcctacaggcagattttttgccacggttcgtggcatttgaaacaatcgtgcgggagattgctccttcgcgactcacagtttgacgccaaaatgaataatcctggcggacgcatatgagtgcctgtaagcct

SEQ ID NO: 15058 - RNA, 133 nt, Pseudomonas sp.
  source 1..133: mol_type = other RNA; note = Related to MUHV01000013.1
gagcttacaggcagatttttttgtcgcgtttcgcgacatttgaaaacatcatgtgggggattgcttcctgacgtgactcaacacgttgacgcgaaattcgtgtcggcggacgcatatgagtgcctgtaagcgt

SEQ ID NO: 15059 - RNA, 134 nt, Pseudomonas sp.
  source 1..134: mol_type = other RNA; note = Related to NZ_SOCQ01000001.1; note = Pseudomonas helmanticensis
gagcttacaggcagatttttttgtcgcggttcgcgacatttgaaagtattgcgtgggagattgcttcctatcgtaactctacaagtttgacgcgaagttcgtgtcggcggacgcatatgagtgcctgtaagcgt

SEQ ID NO: 15060 - RNA, 132 nt, Pseudomonas sp.
  source 1..132: mol_type = other RNA; note = Related to CP050147.1; note = Pseudomonas aeruginosa
gagcttacaggcagatttttttgccacggttcgtggcatttgagaaggtcgtgtgggagattgcttctatacgagtcacaagttatgcgctgaaagtgtgtctgacggacgcgtatgagtgcctgtaagcct

SEQ ID NO: 15061 - RNA, 133 nt, Pseudomonas sp.
  source 1..133: mol_type = other RNA; note = Related to QJUQ01000005.1; note = Pseudomonas kirkiae
aggtttatagacagattttttgccatggttcgtggcatttgaaatcattgtgtgggggaatgcttcctcagacttccgcaatctttacgccatgatgactgtctggcggacgcatatgagtgtctataaacct

SEQ ID NO: 15062 - RNA, 133 nt, Pseudomonas sp.
  source 1..133: mol_type = other RNA; note = Related to NZ_CP052862.1
gagcttatagatagattttttgtcatgtttcgtgacatttgcaaatcttgtgtgagtgattgctcatacagttatcagcagtcttggcgccaaagtaaatgtctggcggacgctaatgagtatctataagctc

SEQ ID NO: 15063 - RNA, 136 nt, Pseudomonas fluorescens
  source 1..136: mol_type = other RNA; note = Related to JAGGOG010000003.1
aggcttatagatagatttttggtcgtgtttcgcgatctgtgatacctaatgtcggagtacattgctcctacaattttgcaagctgtttggcgcttcagggttacttgaagtttcgcataagagtatctataagcct

SEQ ID NO: 15064 - RNA, 136 nt, Pseudomonas sp.
  source 1..136: mol_type = other RNA; note = Related to NZ_LT607556.1
aggcttatagatagatttttggtcgtgtttcgcgatctgtgatacctaatgtcggagtacattgctcctacaatttagcaagctgtttggcacttcagggttacttggagtttcgcataagagtatctataagcct

SEQ ID NO: 15065 - RNA, 137 nt, Pseudomonas fluorescens
  source 1..137: mol_type = other RNA; note = Related to NZ_CABVHD010000002.1
aggcttatggatagattttttgtcgtgtttcgcgacatgtgataccaaatgtcggagtacattgctcctgacagactttgcaagcgtgcggttcaaatgggtcgctatgagtttcgcgtaagagtatccataagcct

SEQ ID NO: 15066 - RNA, 137 nt, Pseudomonas sp.
  source 1..137: mol_type = other RNA; note = Related to NZ_UTCV01000055.1; note = Pseudomonas viridiflava
aggcttatggatagattttttgtcgtgtttcgcgacatgtgacatcaaatgtcggagtacattgctcctgacagactttgcaagcgggcgcttcagaagggttcccatgagtttcgcgtaagagtatccataagcct

SEQ ID NO: 15067 - RNA, 127 nt, unidentified
  source 1..127: mol_type = other RNA; note = Related to JAHKPP010000027.1; note = Saccharophagus degradans
tggcttctaggcagattttgtgttgcgtttcgcaacatttgaaaacaacgtcctaaggaattgccctgtgtgacgcctttcgtcattacgctatgcggtgaaacggcgtaagagtgcctagaagcct

SEQ ID NO: 15068 - RNA, 128 nt, Chromobacterium sp.
  source 1..128: mol_type = other RNA; note = Related to NZ_LCWR01000203.1; note = Chromobacterium subtsugae
gggcttgcaaatagatttttttgccatgcttcgtggcaagtgataataatgctgagtggtatagctcagtatctcgttgtattcagtgaatgtatgcgatattccgcataaagagtatttgcaagcct

SEQ ID NO: 15069 - RNA, 129 nt, Chromobacterium sp.
  source 1..129: mol_type = other RNA; note = Related to CP069442.1; note = Chromobacterium violaceum
aggcttgcaaatagatttttttaccgcgtatcgtggtaagtgttaataatgctgagtggtatagctcggtatcttgtgtccaatagggtaatcctgtgcaaattaccgcataagagtatttgcaagccg

SEQ ID NO: 15070 - RNA, 147 nt, unidentified
  source 1..147: mol_type = other RNA; note = Related to NZ_CP031124.1; note = Ephemeroptericola cinctiostellae
agggctatagatagactttttgacgcgctatcgtgtcatgtgaaaaaaatgttgcacagacttattatgctgcattgtttcaaatttattaatttcattttttagtggttgatctttaactacgcaaacaagagtatctatagccca

SEQ ID NO: 15071 - RNA, 124 nt, unidentified
  source 1..124: mol_type = other RNA; note = Related to JAEMNU010000126.1; note = Rugamonas sp.
tggcctataaacagattttttgtcatgattcgtgacaagtatgaataatgtcgctaagtattgccttaatgttcgcccagttgtcctggaatgacgcgctttgcgtaagagtgtttataggcca

SEQ ID NO: 15072 - RNA, 129 nt, unidentified
  source 1..129: mol_type = other RNA; note = Related to NZ_CP009962.1; note = Collimonas arenae
gggcttatagatagattttttgtcatgcatcgtgacacgtgaaataaacgttaggcagcattgcctatgaatatacttagcaatatcctagcggtaaacgttaagctgcataggagtatctataggccc

SEQ ID NO: 15073 - RNA, 134 nt, Pseudomonas sp.
  source 1..134: mol_type = other RNA; note = Related to RHQT01000006.1
gggtttataggcagattttttgtcatgcttctgtgacaagtggcaacaatgttgggcgccaatgctcacatatccctcccagagtggtcgactcgattggtcactgtgattcgcgtaagagtgcctataaaccc

SEQ ID NO: 15074 - RNA, 134 nt, Pseudomonas sp.
  source 1..134: mol_type = other RNA; note = Related to CP066045.1; note = Pseudomonas stutzeri
gggcttatagacagattttttgtcatgcttctgtgacaagtggcaccaatgttggagtccatcgctctaatagttcttctcagaatggtcatctaaggtcatctctggtaacgcgtaagagtgtctataagccc

SEQ ID NO: 15075 - RNA, 130 nt, unidentified
  source 1..130: mol_type = other RNA; note = Related to JAIZSB010000002.1; note = Burkholderia cepacia
ggacttgcggatagattttttgtcatgcttcgtgacacgtgaaataaatggtggagagattgcttatccattatccgctttgcaattactatgcataatgcacctactgcgtaggagtatccgcaggtcc

SEQ ID NO: 15076 - RNA, 129 nt, unidentified
  source 1..129: mol_type = other RNA; note = Related to QTSF01000012.1; note = Burkholderia cenocepacia
ggacttgcggatagattttttgtcatgtttcgtgacacgtgaaataaatggtggagagattgctatccattatccgctttgcaattactatgcataatgcacatactgcataggagtatccgcaggtcc

SEQ ID NO: 15077 - RNA, 130 nt, unidentified
  source 1..130: mol_type = other RNA; note = Related to CABWIJ010000002.1; note = Burkholderia lata
ggacttgcggatagattttttgtcatgtttcgtgacacgtgaagtaaatggtggagagattgcttatccattatccgtttagcaattactatgcataatgcagtaaccgcataggagtatccgcaggtcc

SEQ ID NO: 15078 - RNA, 126 nt, unidentified
  source 1..126: mol_type = other RNA; note = Related to NZ_JMLA01000001.1; note = Methylobacter tundripaludum
gggcttatagacagattttttgtcatgtttcgtgacacgtgaagataaagtttggtgctattgcatccttacgtcccttaggcaattttgggcaatatccctttgcataagagtatctataagccc

SEQ ID NO: 15079 - RNA, 131 nt, unidentified
  source 1..131: mol_type = other RNA; note = Related to NZ_FNKX01000001.1; note = Paraburkholderia tuberum
gggcttgtagacagattttttgtcatgtttcgtgacatgtgaaagcaatgttggggttattgctcctcattattcccattatgcaatttcttagcaaattgcagataccgcataggagtgtctgcaagccc

SEQ ID NO: 15080 - RNA, 127 nt, unidentified
  source 1..127: mol_type = other RNA; note = Related to JACVPK010000006.1; note = Polynucleobacter wuianus
aggtttgtgggtagattttttgtcatgcatcgtgacaagcgttaacaatgtcgggcttattgccctttacttattccttgcaatttctatgcgaaagctactactgcgtaagagtacccacaaacct

SEQ ID NO: 15081 - RNA, 133 nt, unidentified
  source 1..133: mol_type = other RNA; note = Related to PHCU01000169.1; note = Betaproteobacteria bacterium HGW-Betaproteobacteria-12
gggccgttgggcagagtttttgccgttgattcgcggcatgtgacaacaaagtcagaggctttgcccctgatatccgatccaaatgggattcgctggatgatccctatgatgcttaagagtgcctaacgcgccc

SEQ ID NO: 15082 - RNA, 134 nt, unidentified
  source 1..134: mol_type = other RNA; note = Related to NCCT01000010.1; note = Hydrogenophilales bacterium 12-61-10
gggccgttgggcagagtttttgccgttgtttcgcggcatgtgacaacaatgtcagtggctttgcctcctgatgtccgatgtaaatgggatcagcttaatgatctccgtaatgctaaagagtgcctaacgtgccc

SEQ ID NO: 15083 - RNA, 132 nt, unidentified
  source 1..132: mol_type = other RNA; note = Related to JAGFNH010000001.1; note = Candidatus Accumulibacter sp.
gggccgttgggcagagtttttgccgttgattcgcggcatgtgacaacaaagtcaggggctttgccgcctgatatccgttagatggcccgctgatgtggtccatagtagtgcttaagagtgcctaacgcgccc

SEQ ID NO: 15084 - RNA, 138 nt, unidentified
  source 1..138: mol_type = other RNA; note = Related to JAIQFH010000036.1; note = Acidobacteriia bacterium
gtgcctacagtcagatcttttgctgcgtatcgtggcacgtgacaacaatgtcagatggattgcttgcacgtcgcattgcgcgaccgtatctgactctatcgcactatgtagctatcgcgtaagagtgactgtaggcat

SEQ ID NO: 15085 - RNA, 134 nt, unidentified
  source 1..134: mol_type = other RNA; note = Related to JAIQFA010000126.1; note = Acidobacteriia bacterium
ccgcctacagtcagatcttttgccgcgttatcgtggcacgtgacaacaatgtcagttgctttgctggcacatcgctcgacgctactcgatttgccatcgaactatagctctcgcgtaagagtggctgtaggcat

SEQ ID NO: 15086 - RNA, 139 nt, Pseudomonas sp.
  source 1..139: mol_type = other RNA; note = Related to NRAO01000002.1; note = Pseudomonas aeruginosa
gggcttatagcagattttttatcgtgtttcgcgatatgtgacatcaatggtaggcagtattgctatcctcagcggcaacctaacgctatcgacgactcgtggtccacgttagcgttcgcgttatgagtgctataagctc

SEQ ID NO: 15087 - RNA, 133 nt, Pseudomonas sp.
  source 1..133: mol_type = other RNA; note = Related to CP068986.1
gggcttgtagacagatcgttttatcgcgaatcgcgataagtgacatcaacggtggtaggtattgccattacattacttcgcaatctcacgcggagagactcattgacacttgcatatgagtgtctacaagccc

SEQ ID NO: 15088 - RNA, 131 nt, Pseudomonas sp.
  source 1..131: mol_type = other RNA; note = Related to NZ_CP065202.1; note = Pseudomonas fragi
gggcttatagacagatcttttatcgcgtatcgcgatatgtgacatcaacggtagtagttgattgctaccgaacgttactgaagtctcaacccgaagactctcggcgtttgcaaatgagtgtctataagccc

SEQ ID NO: 15089 - RNA, 132 nt, Pseudomonas sp.
  source 1..132: mol_type = other RNA; note = Related to JAHUWE010000017.1
gggtttatagacagattttttatcgcgaatcgcgatatgtgacatcaacggtagtatgcattgctacttaacgttactcgaagtctcaaactgaggcacattggcaggttgcaaatgagtgtctataaaccc

SEQ ID NO: 15090 - RNA, 125 nt, unidentified
  source 1..125: mol_type = other RNA; note = Related to CP028127.1; note = Xanthomonas vasicola
ggggttgcaggaagatttggttgccgtagtctcgcggcatcagaaacgattgcaaggtgaatttgccgattggcgcgagtgcagcaatacgctcgccatgcgtgcgaaggagttcctgcaacccc

SEQ ID NO: 15091 - RNA, 125 nt, unidentified
  source 1..125: mol_type = other RNA; note = Related to NZ_CP064002.1; note = Xanthomonas translucens
ggggttgcaggaagatttggttgccgtcgtttcgcggcatcagaagcaattgcaaggtggatttgccgaatggaccgagtgccgacatacgctcgccatgcgcgcgaaggagttcctgcagcccc

SEQ ID NO: 15092 - RNA, 125 nt, unidentified
  source 1..125: mol_type = other RNA; note = Related to NZ_NSGT01000016.1; note = Xanthomonas sp.
ggggttgcaggaagatttggttgccgtagtttcgcggcttcagaaaaaattgcaaggtggatttgccgaatggcgcgagggcagctacgcgctcgcgacgcgtgcgaaggagttcctgcaacccc

SEQ ID NO: 15093 - RNA, 125 nt, unidentified
  source 1..125: mol_type = other RNA; note = Related to JAJA02000003.1; note = Lysobacter capsici
ggggctgcaggaagatttggttgccgtagtttcgcggcatcagaaacaattgcagcgtggatttgcctaatggctcgactgcagcgatacgctcgctgtgcgtgccaatgagttcctgcagcccc

SEQ ID NO: 15094 - RNA, 125 nt, unidentified
  source 1..125: mol_type = other RNA; note = Related to FOAX01000001.1; note = Pseudoxanthomonas sp.
ggggttgcaggaagatttggttgtcgcgtttcgcggcatcagaaacaattgcaagaaagatttgccggttggcgctgagtgcagctcggcgcgcgctgggcgtgcgaaggagttcctgcaacccc

SEQ ID NO: 15095 - RNA, 124 nt, unidentified
  source 1..124: mol_type = other RNA; note = Related to JAIWPR010000054.1; note = Luteimonas sp.
ggggttgcaggaagatttggttgccaccgaatcgtggcatcagaaccaattgcacgatcgatttgccgagtggcgctgagtgcaactgtgcgcgactggctagcgagggagttcctgcaacccc

SEQ ID NO: 15096 - RNA, 126 nt, unidentified
  source 1..126: mol_type = other RNA; note = Related to CP018725.1; note = Xanthomonas vesicatoria
ggggttgcaggaagatttggttgccgtcgtatcgcggcatcagaagaaattgcaggatggatttgcccggtggcgctgagtgcagcttggcgctcgcctcgcgtgcgagagagttcctgtaacccc

SEQ ID NO: 15097 - RNA, 126 nt, unidentified
  source 1..126: mol_type = other RNA; note = Related to CP011130.1; note = Lysobacter capsici
ggggttgcaggaagatttggttgccgccgaatcgcggcatcagaagcaattgcaagatggatttgcccggtgacgctgagtgcaactcggcgctcgcttggcgtgcgagagagttcctgcaacccc

SEQ ID NO: 15098 - RNA, 126 nt, unidentified
  source 1..126: mol_type = other RNA; note = Related to JACVAG010000008.1; note = Pseudoxanthomonas sp.
ggggttgcaggaagatttggtcgccgccgtttcgcggcatcagaaacaattactggatggatttgccccgatggcgcggattgcagcgcagcggtcgcatgttagctaaagagttcctgcaaccct

SEQ ID NO: 15099 - RNA, 129 nt, unidentified
  source 1..129: mol_type = other RNA; note = Related to JAHCAU010000005.1; note = Lysobacter sp.
ggggttgcaggaagatttggttgccgacgtttcgcggcatcagaagtcattgtccgctggatttgccccggttagcacgagtgcagcgtatcgcgctcgcatcgcttgcgaaggagttcctgcaaccct

SEQ ID NO: 15100 - RNA, 126 nt, unidentified
  source 1..126: mol_type = other RNA; note = Related to NZ_CP018756.1; note = Stenotrophomonas maltophilia
ggggctgcaggtagatccttttgtcgtggtttctgcgacatacgaaacaattgttggttggattgctccgagtggcaccgttgcggcgtccgtcgcgcgcaatagcgagtgagtacctgcagcccc

SEQ ID NO: 15101 - RNA, 125 nt, unidentified
  source 1..125: mol_type = other RNA; note = Related to NZ_WVHR01000032.1; note = Paraburkholderia madseniana
ctgtctgcggacagatttgttatcgcgattcgcgataaatggaagtaatgtgcgaaggcgctgccctcgcatctcgtagcggctatctcgccgatgatacgttgccaaagagtgtccgcagacac

SEQ ID NO: 15102 - RNA, 125 nt, unidentified
  source 1..125: mol_type = other RNA; note = Related to NZ_QLTK01000030.1; note = Paraburkholderia bryophila
ctgtctgcggacagatttgttatcgcgattcgcgataaatggaagtaatgcgcgaaggcgctgccctcgcatatcgtagcggctatctcgctgatgatacgttgccaaagagtgtccgcagacac

SEQ ID NO: 15103 - RNA, 123 nt, unidentified
  source 1..123: mol_type = other RNA; note = Related to JAAGPR010000055.1; note = Paraburkholderia sp.
tcgtctgcggacagatttgttatcgtgtttcgcgataaatggacgtatcgttaggcgacgttgccctcgcatatcgtagcatccgccatgagatgagccttgccatagagtgtccgcagacat

SEQ ID NO: 15104 - RNA, 123 nt, unidentified
  source 1..123: mol_type = other RNA; note = Related to NZ_JZUR01000039.1; note = Burkholderia vietnamiensis
cggcctacggacagatttattgtcgtgcttcgcgacaaatggaagtcatgtgggggggtgttgccctcgcctatccttagcatccgctatgaatgatgcgtgccaaagagtgtccgtaggcat

SEQ ID NO: 15105 - RNA, 125 nt, unidentified
  source 1..125: mol_type = other RNA; note = Related to NZ_LT977071.1; note = Cupriavidus taiwanensis
gggcctgcggatagatttattgtcgtgtttcgcgacaggtggaagtcatgcaagggaagattgcctttgcgtcaatgtagcaatgtgccgtgaatcgtcgctgccagagagtgtccgtagcgccc

SEQ ID NO: 15106 - RNA, 124 nt, unidentified
  source 1..124: mol_type = other RNA; note = Related to JAFEDJ010000026.1; note = Proteobacteria bacterium
gggcctacggatagatttattgtcgtgcttcgcgacagatggaagtcatgtatgggtagattgcccttgcgtcgtcgtagcaatatgtcggcgatgtagctgccaaagagtatccgtagcgccc

SEQ ID NO: 15107 - RNA, 133 nt, unidentified
  source 1..133: mol_type = other RNA; note = Related to NZ_JAJJOZ010000002.1; note = Paracandidimonas sp.
tggcccgtagacagagtttctgccatgtaatcgtggcacttgacaataacgtgaggacctatgctcctcagtccataatgccttacgcgacttgagtgttggcaatatttgcatttgagtgtctacgtggccg

SEQ ID NO: 15108 - RNA, 130 nt, unidentified
  source 1..130: mol_type = other RNA; note = Related to NZ_JACJUU010000033.1; note = Pusillimonas minor
ggcctcgtagacagagtttctgccgtgtgatcgtggcacttgacaataatgtgaggagctatgctcctatcaataacgcttagcacgattatagtgttagcaatgtttgcttttgagtgtctacttggcc

SEQ ID NO: 15109 - RNA, 135 nt, unidentified
  source 1..135: mol_type = other RNA; note = Related to JAHJHQ010000474.1; note = Gammaproteobacteria bacterium
ggcctcgtagacagactttctgccatgtgatcgtggcacttgacaaaaatgtgaggacctatgccctcctaccaccatgcggctcatcttttaatgatgctgatcgcgatgtagcaatggagtgtttacggggcc

SEQ ID NO: 15110 - RNA, 137 nt, unidentified
  source 1..137: mol_type = other RNA; note = Related to NZ_MCAS01000001.1; note = Paraburkholderia fungorum
ggtctcgcagacagaatttctgccatgtaatcgtggcacttggcaacaatgtgaggacctatgccctcgtatgcacctgacgaggagacgatgacctgtacgatatcgccgcttggcgattgagtgtctgcgaggcc

SEQ ID NO: 15111 - RNA, 136 nt, unidentified
  source 1..136: mol_type = other RNA; note = Related to FSRU01000001.1; note = Paraburkholderia phenazinium
ggcttcgcagacagagtttctgccatgtaatcgtggcacttgacaacaaagtgaggacctatgctgctcctcggctactacgcctgacggaactttccgttcatatgatcgatcgcgttggagtgtctgcgaggcc

SEQ ID NO: 15112 - RNA, 135 nt, unidentified
  source 1..135: mol_type = other RNA; note = Related to NZ_LOVK01000019.1; note = Burkholderia ubonensis
ggcttcgcggacagagtttctgccatgtaatcgtggcacttgacaacaatgtgaggacctatgctgctcctcggctactacgccggacggaatttccgttcatatgatcgatcgcgttggagtgtccgcgaggcc

SEQ ID NO: 15113 - RNA, 135 nt, unidentified
  source 1..135: mol_type = other RNA; note = Related to NZ_CABPSB010000021.1; note = Pandoraea anhela
cgcctcgtagacagaatttctaccatgaatcatggcacttggcaataatgttaggacctatgctgctatcgatatcaaccggattggcgccataacgatgtagcgttcaatgcgcgttggagtgtctacgaggca

SEQ ID NO: 15114 - RNA, 133 nt, unidentified
  source 1..133: mol_type = other RNA; note = Related to NZ_CABPSK010000001.1; note = Pandoraea pneumonica
cgcctcgtagacagaatttctgccatgaatcatggcacttgacaacaatgttaggacctatgctgcatcgatatcaacctgattggcgccatgtggagcaggagccaatacgcgttggagtgtctacggggct

SEQ ID NO: 15115 - RNA, 134 nt, unidentified
  source 1..134: mol_type = other RNA; note = Related to NZ_LT984806.1; note = Cupriavidus sp.
cgccccgtaggcagaatttctgccatgaatcatggcacttggtaacaaagttaggacctatgctgcatcgatatcaaccgtaatgacgccatgctgagattgcggccaattcgcgttggagtgtctacggggtt

SEQ ID NO: 15116 - RNA, 134 nt, unidentified
  source 1..134: mol_type = other RNA; note = Related to WSNR01000001.1; note = Ralstonia solanacearum
tgccccgtagacagaatttctgccatgaatcatggcatttggcaacaatgttaggacctatgctgcatcgggtatcatccgacggacgccatgcgtagctcgtggccaattcgcgatggagtgtctacggggcc

SEQ ID NO: 15117 - RNA, 133 nt, unidentified
  source 1..133: mol_type = other RNA; note = Related to CP028290.1; note = Acidovorax cattleyae
ggctccgtagacagactttctgccatgtatcgtggcacttgacaacaacgtgagggcctatgcctcatccttatgaatcgacacagcgtatttgtatgtgacgattggttcgcgtaagagtgtctgcggagcc

SEQ ID NO: 15118 - RNA, 129 nt, unidentified
  source 1..129: mol_type = other RNA; note = Related to NZ_JACBGE010000023.1; note = Hydrogenophaga sp.
ggagcctcaggaagaattttttggcctgtatcgggctgagtgaaatcaacgttgggtggattgctcccggcgtatcttccagtattcatcgctgtcaatctgcgatgcctaatgagttcctggggctcc

SEQ ID NO: 15119 - RNA, 129 nt, unidentified
  source 1..129: mol_type = other RNA; note = Related to MRCN01000005.1; note = Variovorax boronicumulans
ggacacccaggaagatttttcggcccgcatcgggtcgtgtgaagacaaggtccggcaggttgcccctacgtctatctcatcgcttagcaccttctcatcttacgatgcagaatgagttcctgggtggcc

SEQ ID NO: 15120 - RNA, 133 nt, Achromobacter sp.
  source 1..133: mol_type = other RNA; note = Related to JADCNH010000007.1
ggccccgcaaacagatttttttgtcgtgtttcgcggcaagtgaacgaaatgtttccgggtatgctccatgtcggctaactggttatcgtacagctgatgtatgctcatcaagccaatgagtgtttgtggggcc

SEQ ID NO: 15121 - RNA, 142 nt, unidentified
  source 1..142: mol_type = other RNA; note = Related to NC_020813.1; note = Pseudobdellovibrio exovorus
tggtctatgggtagactttgtgctgcggatcgcagcatttgatgaattgtcatcaagtgtcttatttactctacgagtgtctaaccgtatagtctctttcgcttggctttagtgtatgttggtaaagagtacccatagacca

SEQ ID NO: 15122 - RNA, 129 nt, unidentified
  source 1..129: mol_type = other RNA; note = Related to NZ_JADPQF010000006.1; note = Aliikangiella sp.
ttgcctaggggtagaattttacatcgcgaatcgcgatgcgagataataatggtaggcagattgccactcgaatagtcattccgatgagctattggtcgcatgagactgcaaaggagtacccctaggttt

SEQ ID NO: 15123 - RNA, 146 nt, unidentified
  source 1..146: mol_type = other RNA; note = Related to NZ_QJSU01000001.1; note = Psychrobacter fozii
agacctataaatagattttatcattgtgcttcacaatgagtgattttcaagctactactccttttaagctcatgaggttctatgaggctcttggtttgtcgtagggttcctagtgtattatattgcgaaagagtatttataggtct

SEQ ID NO: 15124 - RNA, 126 nt, unidentified
  source 1..126: mol_type = other RNA; note = Related to NZ_BMXO01000001.1; note = Halomonas johnsoniae
ttgcttgcagacagatttttttgtcatgcttcgtgacaggtgaaatcaatgttaggggctttgccatttagcattccttgacggtagcgatgctacctgaacgcgcataagagtgtctgcaagcat

SEQ ID NO: 15125 - RNA, 130 nt, unidentified
  source 1..130: mol_type = other RNA; note = Related to NZ_JACTAG010000001.1; note = Sulfitobacter aestuariivivens
tagcttgcggatagatctttccgctgtggttcgcagcgggtgaaaaaattgttcggaggaattgctccttcgtcatctttgcaacattgttggaaatccgtgggtttgctcaacgagtatccgcaagcga

SEQ ID NO: 15126 - RNA, 128 nt, unidentified
  source 1..128: mol_type = other RNA; note = Related to NZ_FOPM01000016.1; note = Methylobacterium gossipiicola
aggcttgcaggcagattcgttgttatgtttcgtaacaagtaatataaatggcgggggcatcgccttcgcgactcgtgatcctggtgaccttgactgtcatcctgcgcatagagagtgcctgcaagctt

SEQ ID NO: 15127 - RNA, 129 nt, unidentified
  source 1..129: mol_type = other RNA; note = Related to JAKSXV010000098.1; note = Methylobacterium sp.
gggcttgtaggcagattcgttgctatgtttcgtagcaagtaacataaatggcgggggcatcgcctccgtgactcgtggcttcgatgaccttcgactgtcatcctgtgcatagagagtgcctacaagccc

SEQ ID NO: 15128 - RNA, 128 nt, unidentified
  source 1..128: mol_type = other RNA; note = Related to QYRN01000007.1; note = Aureimonas flava
cggtttacaggcagatccgttgttgtgtttcgcaacaagtaacataaaagtctcccgcattgcctcagcatctggcgatcacgacgggtcgatgggtcctggggtgcatagagagtgcctgtaaaccg

SEQ ID NO: 15129 - RNA, 136 nt, unidentified
  source 1..136: mol_type = other RNA; note = Related to JAFUJV010000004.1; note = Treponema sp.
tgccctataagtagattttattattgtgtttcgcaatatttgaagaaaatactgcatgaggtttctcggctattttcgttctatgtttcagattagacagacagaagatctatcgccaaagagtacttatagggct

SEQ ID NO: 15130 - RNA, 127 nt, Salmonella sp.
  source 1..127: mol_type = other RNA; note = Related to AANPCH010000002.1; note = Salmonella bongori
gggcctatagatagattttgtatcatgtttcgtgatatgtgaaaaaaatgttagaggcaacgccctaagtatgctttacgccagaggtaaatgcctcacgctatgctaaagagtttctatagtgccc

SEQ ID NO: 15131 - RNA, 127 nt, Salmonella sp.
  source 1..127: mol_type = other RNA; note = Related to CP074306.1; note = Salmonella enterica
gggcctatagatagattttgtatcatgtttcgtgatatgtggaaaaaatgttagaggcaacgcccctagtatgctttacgccagagggaaatacctcacgctgtgctaaagagtttctatagtgccc

SEQ ID NO: 15132 - RNA, 125 nt, unidentified
  source 1..125: mol_type = other RNA; note = Related to NZ_LT615367.1; note = Dickeya aquatica
gggcctatagaaagattttgtatcatgtttcgtgatatgtgaaaaaaaagttagaggcaacgccttaagtatgctcggtcatgaggaactacctcacgccctgctaaagagtttctatagtgccc

SEQ ID NO: 15133 - RNA, 141 nt, unidentified
  source 1..141: mol_type = other RNA; note = Related to JAGGMP010000001.1; note = Erwinia rhapontici
gtgcccatagttagattttgtgtcatgtttcatgacaagtgaaaagaacgttggagccaacgctccttgaagtatccttaaagagtaacatggatagccgccaagttactcgtcgaatcgcgtaagagtaactatgggcac

SEQ ID NO: 15134 - RNA, 139 nt, unidentified
  source 1..139: mol_type = other RNA; note = Related to NZ_NRNL01000028.1; note = Cronobacter malonaticus
ctgcccatagttagattttgtgtcatgtttcgtgacaagtgaaaacaaggttggagccaacgctccctgaatatccttactgagtgacacggatttccgccagtcccccagccaatcgcgtaagagtaactatgggcac

SEQ ID NO: 15135 - RNA, 140 nt, unidentified
  source 1..140: mol_type = other RNA; note = Related to SZZV01000010.1; note = Pantoea sp.
tcgcccacagttagattttgtgtcatgtttcgtgacaagtgataacaacgttggagccaacgctgctctaatggcgtcaaagaggtacagggggaaacgctaagttgctcccaatatcgcataagagtaactgtgggcac

SEQ ID NO: 15136 - RNA, 129 nt, unidentified
  source 1..129: mol_type = other RNA; note = Related to NSDJ01000002.1; note = Rahnella variigena
tggtctataaacagattttgtgtcgcgtatcgcgataagtgaaagtaaggttggagacaaccgccgcgttgaaataatatggccaccggtgggtcgccgtatgagtgcgataagagtgtttatagaccc

SEQ ID NO: 15137 - RNA, 130 nt, unidentified
  source 1..130: mol_type = other RNA; note = Related to NZ_CAKLIS010000018.1; note = Pectobacterium versatile
tggtctataaacagattttgtgtcgcgaatcgcgataagtgaaaaaaaggttggagacaaccgccccattgaaaacgtgacggcaccgccagtgtgcatactcgaatgcgttaagagtgtttatagacca

SEQ ID NO: 15138 - RNA, 135 nt, unidentified
  source 1..135: mol_type = other RNA; note = Related to NZ_JAFBFW010000001.1; note = Pantoea coffeiphila
tggtttatgggcagattttgggtcgcgtttcgcgatcagtgaaaaaaatgtccggtaggattgccctttcaggaactcattgtcctggcgcttcttaggttcttgtcaagtttgcgtaagagtgcccataaacct

SEQ ID NO: 15139 - RNA, 134 nt, unidentified
  source 1..134: mol_type = other RNA; note = Related to AP025009.1; note = Raoultella ornithinolytica
cggtttatgggcagattttgggtcgcgtttcgcgatcagtgaaaaaaatgtccgataggattgcctttcaggaactcattgtcctggcgtttcttgaattcttgtcaagtttgcgtaagagtgcccataaacca

SEQ ID NO: 15140 - RNA, 134 nt, unidentified
  source 1..134: mol_type = other RNA; note = Related to LMLK01000003.1; note = Erwinia sp.
tggtttatgggcagattttggatcgcgtttcgcgatcagtgaaaaaaatgtccgattggattgcctctcagggtctcactttcctggctttacctgacttcttgtcaagtttgcgtaagagtgcccataaacca

SEQ ID NO: 15141 - RNA, 135 nt, unidentified
  source 1..135: mol_type = other RNA; note = Related to CP071802.1; note = Yersinia ruckeri
tggtttatgggcagattttggatcgcgtttcgcgatcagtgaaaaaaatgtccgataggattgcctttcagggtctcacgttctccgcgctactcgaggttcttgtcaagtttgcgtaagagtgcccataaacca

SEQ ID NO: 15142 - RNA, 135 nt, Escherichia coli
  source 1..135: mol_type = other RNA; note = Related to NZ_CP080146.1
tggtttatgggcagattttgggtcgcgtttcgcgatcagtgaaaaaaatgtccgataggattgcctttcaggatctcatgttcctcgcatttcttaaggttcttgtcaagtttgcgtaagagtgcccataaaccc

SEQ ID NO: 15143 - RNA, 135 nt, unidentified
  source 1..135: mol_type = other RNA; note = Related to NZ_CP065024.1; note = Rahnella inusitata
tggtttatgggcagattttggatcgcgtttcgcgatcagtgaaaaaaatgtccaataggattgcctttcaggggctcacgttcctggcgttactcgacggtcttgtcaagtttgcgtaagagtgcccataaacca

SEQ ID NO: 15144 - RNA, 136 nt, Vibrio parahaemolyticus
  source 1..136: mol_type = other RNA; note = Related to LQCW01000011.1
tggtttatgggcagattttggttcgcgtttcgcgatcagtgaaaaaaatgtccgactggattgcctttcaggttctcacgtttccggacgctcttttaacttcttgtcaagtttgcgtaggagtgcccataaacca

SEQ ID NO: 15145 - RNA, 137 nt, Vibrio sp.
  source 1..137: mol_type = other RNA; note = Related to KB662759.1; note = Vibrio cholerae
cggtttatgggcagattttgggtcgcgtttcgcgatcagtgaaaaaaatgtccgataggattgccttttcaggttctcatgtttccggatgctcttttaacttcttgtcaagtttgcgtaggagtgcccataaacca

SEQ ID NO: 15146 - RNA, 135 nt, Vibrio parahaemolyticus
  source 1..135: mol_type = other RNA; note = Related to JACBSO010000017.1
cggtttatgggcagactttgggtcgcgtttcgcgatcagtgaaaaaaatgtccgagtggtttgccttgtgtagctcattgtaccggatgctctttgaacttcttgtcaagtttgcgtaggagtgcccataaacca

SEQ ID NO: 15147 - RNA, 134 nt, Aeromonas sp.
  source 1..134: mol_type = other RNA; note = Related to JAKZFL010000005.1
aggtttatgggcagatattggatcgcgcttcgcgatcagtgaaaaaaacgtccgaaaggattgcccgaaggtatcacgttgtcagacgctctccgtagttcttgtcacgtttgcgtaggagtgcccataaacca

SEQ ID NO: 15148 - RNA, 134 nt, Aeromonas salmonicida
  source 1..134: mol_type = other RNA; note = Related to QLLM01000001.1
tggtttatgggcagatttttgatcgcgcttcgcgattagtgaaaacaatgtccgaaaggattgccattttgatatcaaattgtcagagctctccgtagttcttgtcaagtttgcgtaggagtgcccataaacca

SEQ ID NO: 15149 - RNA, 134 nt, Vibrio sp.
  source 1..134: mol_type = other RNA; note = Related to POSH01000027.1; note = Vibrio diazotrophicus
tggtttatgggcagattttggatcgcgtttcgcgatcagtgaaaataatgtccgattggattgccctttttgataacgattgctcaatgctttttgacgtcttgtcaagtttgcgaaggagtgcccataaacca

SEQ ID NO: 15150 - RNA, 134 nt, unidentified
  source 1..134: mol_type = other RNA; note = Related to WMDE01000004.1; note = Photobacterium carnosum
tggtttatgggcagatttggatcgcgcttcgcgatcagtgaaaaaaatgtccgagtggattgcctttaaagtatcatattttctgattctttctgaacttcttgtcaagtttgcgtaggagtgcccataaacct

SEQ ID NO: 15151 - RNA, 135 nt, unidentified
  source 1..135: mol_type = other RNA; note = Related to NZ_SODO01000007.1; note = Oceanimonas baumannii
cggtttatgggcagattttggatcgcgcttcgcgatcagtgaaaaaaatgtccgataggattgcctttaaggtttcatattttctgatgcctttttaacgtaatgtcaagtttgcgtaggagtgcccataaacca

SEQ ID NO: 15152 - RNA, 130 nt, unidentified
  source 1..130: mol_type = other RNA; note = Related to NZ_FNXF01000003.1; note = Rheinheimera pacifica
cggtttatgggcagattttggattgcgtttcgcaatcagtgaaaaaaatgtccgaaaggattgcctctacaatgatatgtacaccatgtctgacaatctcttgtcaacgcgaaggagtgcccataaacca

SEQ ID NO: 15153 - RNA, 131 nt, unidentified
  source 1..131: mol_type = other RNA; note = Related to NZ_JYNJ01000140.1; note = Thalassomonas viridans
cggtttatgggcaggttttggatcgcgcttcgcgatcagtgaaaaaaatgtccgaaaggattgccttttaggagacgatttatacggttcctaatgttccctcaggagtgcataagagtgcccataaaccc

SEQ ID NO: 15154 - RNA, 125 nt, unidentified
  source 1..125: mol_type = other RNA; note = Related to JAHVIP010000004.1; note = Marinobacter daepoensis
aggcttgtgggcagattttgggttgcgattcgcgacttgtgatgacaatgtcctgccgtttgcactcggacgacctttacgtgctctgcagaggacttgaatagcgtaggagtgcccacaagccg

SEQ ID NO: 15155 - RNA, 129 nt, unidentified
  source 1..129: mol_type = other RNA; note = Related to NZ_VMHP01000002.1; note = Marinobacter halotolerans
tggcttatgggcagattttgggtcgcgcttcgcgatctgtgaaaacattgcccgaagggattgcaccttatggacgatctcacgtgtcacattgacgttctgactgagcgaaagagtgcccataagcca

SEQ ID NO: 15156 - RNA, 129 nt, unidentified
  source 1..129: mol_type = other RNA; note = Related to JAHMIN010000032.1; note = Hahella sp.
gggcttatgggcagattttgggtcgcgattcgcgatctgtgaaaacaatgtccgagagaattgctcttgacaggcttttacacgtgactgaatagtacttggtctgtgcgtaagagtgcccataagcct

SEQ ID NO: 15157 - RNA, 128 nt, unidentified
  source 1..128: mol_type = other RNA; note = Related to CP091442.1; note = Pseudoalteromonas sp.
tagcttacgggcagatttttgttcgcgcttcgcgaacagtgaaaaaaatgttcgaacggaccgcctatgaggaaatgtatcatcactttaaggtacttctcgacacgcgtaagagtgcccgtaagcta

SEQ ID NO: 15158 - RNA, 128 nt, unidentified
  source 1..128: mol_type = other RNA; note = Related to BLIJ01000065.1; note = Alteromonas sp.
cggcttatgggcagatattgggtcgcgcttcgcggccagtgataaaattgttagaggggattgccctcaaatttccttgtgacgtctttaagtacctgatgtccgagcgtaggagtgcccataagcca

SEQ ID NO: 15159 - RNA, 125 nt, Vibrio sp.
  source 1..125: mol_type = other RNA; note = Related to NZ_CP016347.1; note = Vibrio natriegens
cagcttatgggcagattttttgttcgcgtttcgcgaacagtgaaaaaatggtccgttcggattgcctgataatcgtattcatgtaggtatttaaatacatagtgcctaggagtgcccataagctc

SEQ ID NO: 15160 - RNA, 127 nt, unidentified
  source 1..127: mol_type = other RNA; note = Related to AAXY01000057.1; note = Marinobacter sp.
tggcttatgggcagatttttagttcgcgtttcgcgatcagtgaaaaaattgtccgtacggattgccttgtatgtatattcatatgtttatatatgattatatggtgcctaggagtgcccataagcca

SEQ ID NO: 15161 - RNA, 126 nt, Vibrio sp.
  source 1..126: mol_type = other RNA; note = Related to JXXT01000002.1; note = Vibrio nigripulchritudo
cggcttatgggcagatttttagctcgagtttcgcgagcagtgaaaaaaacgtccgaacggattgccgagtagaatatttcgtatcaaatgtatgagactatagtgcgtaggagtgcccataagccg

SEQ ID NO: 15162 - RNA, 128 nt, Vibrio sp.
  source 1..128: mol_type = other RNA; note = Related to NZ_CP046804.1; note = Vibrio cidicii
cggcttatgggcagatttttagttcgcgtttcgcgatcagtgaagaaatggtccgttcggattgccttatatagtatatcatataggtatttataggatatatagtgcgtaggagtgcccataagcca

SEQ ID NO: 15163 - RNA, 128 nt, unidentified
  source 1..128: mol_type = other RNA; note = Related to AAVS01000020.1; note = Alteromonadales bacterium TW-7
cggtttatgggcagatttttagttcgcgcttcgcgaacagtgaaaaaattgtccgttcggattgccttataagtgtatctatatgtaaatttatgggatatatagtgcgtaggagtgcccataaacca

SEQ ID NO: 15164 - RNA, 129 nt, unidentified
  source 1..129: mol_type = other RNA; note = Related to PYOV01000005.1; note = Photobacterium angustum
cggcttatgggcagattttttgttcgcgtttcgcgaattgtgaaaaaattgtccgttcggattgcctcgaataaatagttacacaggtattgccagatatacacaatgcctaggagtgcccataagcca

SEQ ID NO: 15165 - RNA, 126 nt, Aeromonas sp.
  source 1..126: mol_type = other RNA; note = Related to NZ_CP024930.1; note = Aeromonas veronii
cggcttatgggcagattattagctcgcgcttcgcgagcagtgaaaaaattgtccacttggattgccctattatagtgtgtcgatgtgcatgctgagcatatagtgcgtaagagtgcccataagcct

SEQ ID NO: 15166 - RNA, 126 nt, Aeromonas sp.
  source 1..126: mol_type = other RNA; note = Related to JAHUWA010000001.1
cggcttatgggcagattcttcgctcgcgcttcgcgagcagtgaaaaaatggtccgttcggattgccctattgtagtgtatcaatgtgctagacgatattatagtgcataggagtgcccataggcca

SEQ ID NO: 15167 - RNA, 127 nt, unidentified
  source 1..127: mol_type = other RNA; note = Related to NZ_MUNJ01000002.1; note = Plesiomonas shigelloides
aggcttatgggcagatttttgctcgcgattcgcgagttgtgaaaccattatccgtctggattgctcataatgtatcatatcgtacgccacgatgaatcttattacgcgtaagagtgcccataagcct

SEQ ID NO: 15168 - RNA, 126 nt, Pseudomonas sp.
  source 1..126: mol_type = other RNA; note = Related to DOLN01000112.1
cggcttatgggcagatttttagctcgcgtttcgcgagtagtgatgatgttgtcggtacggattgcttatgtagtatgtccatagtgttacatgaatggaccagtgcctaggagtgcccataagcca

SEQ ID NO: 15169 - RNA, 127 nt, unidentified
  source 1..127: mol_type = other RNA; note = Related to JABSPA010000005.1; note = Colwellia sp.
tggtttatgggcagatttttcgttcgcgtttcgcgaacagtgaaacaatgatccgtcaggattgcatcatgtagtatttcgaagttgtatcttcagtatgttagtgccaaggagtgcccataagcca

SEQ ID NO: 15170 - RNA, 127 nt, unidentified
  source 1..127: mol_type = other RNA; note = Related to NZ_CP048031.1; note = Shewanella sp.
cggcttatgggcagatttttggttcgcgtttcgcgagcggtgaaacaattgtccgaaaggattgccatattgaagtttgcacgtatcaaatgtcagcataatggtgcataagagtgcccataagcca

SEQ ID NO: 15171 - RNA, 125 nt, unidentified
  source 1..125: mol_type = other RNA; note = Related to JAHKRD010000030.1; note = Shewanella sp.
cggcttatgggcagatttttagttcgcgtttcgcgaacagtgaaaaaatcgtccgttaggattgcataataaatgttatcgctgcttatcgccatgatacagtgcgtaagagtgcccataagcca

SEQ ID NO: 15172 - RNA, 126 nt, unidentified
  source 1..126: mol_type = other RNA; note = Related to NZ_SEUL01000049.1; note = Pseudoalteromonas fuliginea
cggcttatgggcagatttttagttcgcgcttcgcgaacagtgaaacaattatccgtctggattgcatcttatagtttctcatagttgcttccgtatataataatgcctaggagtgcccataagcca

SEQ ID NO: 15173 - RNA, 129 nt, unidentified
  source 1..129: mol_type = other RNA; note = Related to NZ_CP011029.1; note = Pseudoalteromonas espejiana
tggtttatgggcagatttttggtcgcgtttcgcgacctgtgaaaaaattgttcgagagaactgcctattagtagattatcatcattatgaggctacctgagaaaagtgcctaggagtgcccataaacca

SEQ ID NO: 15174 - RNA, 131 nt, unidentified
  source 1..131: mol_type = other RNA; note = Related to NZ_RRZA01000072.1; note = Pseudoalteromonas prydzensis
cggtttatgggcagatttttggtcgcgcttcgcgacttgtgaaacaatcgttcgagagaactgcctactagtagattatcgtacttttcgaagtctatcagattaaagtgcctaggagtgcccataaaccg

SEQ ID NO: 15175 - RNA, 123 nt, unidentified
  source 1..123: mol_type = other RNA; note = Related to JAEMUI010000038.1; note = Marinomonas spartinae
tggcttatggatagatttttgttcgcgcatcgcgaacagtggaacaattgtccgttaggattgccttatagtattatcaatgtccttataatacttatagcgcgtaagagtatccataagcca

SEQ ID NO: 15176 - RNA, 131 nt, unidentified
  source 1..131: mol_type = other RNA; note = Related to NZ_UATK01000001.1; note = Photobacterium damselae
tggtttatgggcagattttggatcgcgtatcgcgatcggtgaaaacaatgtccgaaaggattgccctttgtgaatgatgtttcaaatgtctgaatgtccttactagagtgcgtaagagtgcccataaaccg

SEQ ID NO: 15177 - RNA, 131 nt, unidentified
  source 1..131: mol_type = other RNA; note = Related to NZ_CP012737.1; note = Pseudoalteromonas sp.
tggtttatgggcagattttgggtcgcgtttcgcgatcagtgaaaaaaatgtcgttgacattacctttatgatgattagctgtactttatgatcattactattgttaaatgtgtaggagtgcccataaacca

SEQ ID NO: 15178 - RNA, 128 nt, unidentified
  source 1..128: mol_type = other RNA; note = Related to CP044399.1; note = Moritella marina
cagcttatgggcagatttagatcgcgtttcgcgatccgtgaaaacaatgtcgaaagatattgcctactattgaacggttttgacggttctaataggatctattggtgcataggagtgcccataagcta

SEQ ID NO: 15179 - RNA, 127 nt, unidentified
  source 1..127: mol_type = other RNA; note = Related to JAFWFN010000035.1; note = Halomonas sp.
tggcttatgggcagattttgggtcgcgtatcgcgatcagtgaaaagaatgtccggcaggaatgcatctttagagtgttacacttgacgctaggttgaccttacatgcgtaggggtgcccataagcca

SEQ ID NO: 15180 - RNA, 123 nt, Pseudomonas sp.
  source 1..123: mol_type = other RNA; note = Related to GL385078.1; note = Pseudomonas syringae
cggcttatgggcagatttttggatcgcggatcgcgatcagtgggaaaaatgttcgaaaggctgcctgatgagacctgtcgctacttgacggtccctactgtgcgtaggagtgcccataagcct

SEQ ID NO: 15181 - RNA, 123 nt, Pseudomonas sp.
  source 1..123: mol_type = other RNA; note = Related to CP089282.1; note = Pseudomonas amygdali
cggcttatgggcagatttttggatcgcggatcgcgatcagtgggaaaaatgttcgagatgctgcctgttgagacttgtcgctggttgacggtccctactgtgcgtaggagtgcccataagcct

SEQ ID NO: 15182 - RNA, 125 nt, Pseudomonas sp.
  source 1..125: mol_type = other RNA; note = Related to GL384649.1; note = Pseudomonas amygdali
tggcttatgggcagatttttgggtcgcggatcgcgaccagtggaaacaatgtccgaaagggctgccttatgagacttgtcgatccttgacggtccctccagttgcgtaggagtgcccataagcca

SEQ ID NO: 15183 - RNA, 125 nt, Pseudomonas sp.
  source 1..125: mol_type = other RNA; note = Related to NZ_UTBG01000001.1; note = Pseudomonas viridiflava
tggcttatgggcagattttttgatcgcggatcgcgatctgtggaaacaacgtccgaaagggctgccttatgagacttgtcgcaccttgacggtccttccagtagcgaaggagtgcccataagcca

SEQ ID NO: 15184 - RNA, 125 nt, Pseudomonas sp.
  source 1..125: mol_type = other RNA; note = Related to WIBD01000035.1
tggcttatgggcagatttttggatcgcggatcgcgatcagttaaaacaatgtccgaaagggctgccttatgagacttgtcgacccttgacggtccctccacttgcgtaggagtgcccataagcca

SEQ ID NO: 15185 - RNA, 125 nt, Pseudomonas sp.
  source 1..125: mol_type = other RNA; note = Related to NZ_LHVB01000014.1; note = Pseudomonas chlororaphis
cggcttatgggcagatttatggatcgcggatcgcgatcagtgggaaaaacgtccgaaaggattgccttatgagacttgtcgacacttgacggtccctccgtttgcgtaggagtgcccataagcca

SEQ ID NO: 15186 - RNA, 125 nt, Pseudomonas sp.
  source 1..125: mol_type = other RNA; note = Related to NZ_VJOY01000005.1; note = Pseudomonas mangiferae
tggcttatgggcagattttggatcgcggatcgcgatcagtgaaaacaatgtccgaatggactgccctatgagacttgtcgactctcgacggtccctcaagtttgcgaaggagtgcccataagcca

SEQ ID NO: 15187 - RNA, 125 nt, Pseudomonas sp.
  source 1..125: mol_type = other RNA; note = Related to NZ_JYHV01000007.1; note = Pseudomonas stutzeri
tggcttatgggcagattttggatcgcggatcgcgatcagtgaaaacaatgtccgaaaggactgcccgatgagacttgtcgacttttgacggtccctccagtttgcgtaggagtgcccataagcca

SEQ ID NO: 15188 - RNA, 125 nt, Pseudomonas sp.
  source 1..125: mol_type = other RNA; note = Related to NZ_AVEF02000221.1; note = Pseudomonas syringae
tggcttatgggcagattttggatcgcggatcgcgatcagtgacaacaatgtccgaaaggactgccctatgagacttgtcgactcttgacggtccctccaatttgcgtaggagtgcccataagcca

SEQ ID NO: 15189 - RNA, 124 nt, Pseudomonas sp.
  source 1..124: mol_type = other RNA; note = Related to QLTL01000007.1
aggcttatgggcagattttggatcgcggatcgcgatcagtgaaaacaatgtccgaaaggactgccctatgagacttgtcgacgtttgacggtccctccagttgcgtaggagtgcccataagccg

SEQ ID NO: 15190 - RNA, 125 nt, Pseudomonas sp.
  source 1..125: mol_type = other RNA; note = Related to NZ_CP018743.1; note = Pseudomonas putida
aggcttatgggcagattttggatcgcggatcgcgatcagtggaaaaaacgtccgaaaggactgccttatgagacttgtcgacttttgacggtccctccagtttgcgtaggagtgcccataagcca

SEQ ID NO: 15191 - RNA, 126 nt, Pseudomonas sp.
  source 1..126: mol_type = other RNA; note = Related to NZ_JZRI01000162.1
tggcttatgggcagattttggatcgcggatcgcgatcagtggtaacaatgtccgaaagactgctcctatgaggctcctctctgcttaagagtccctccaagtttgcgaaggagtgcccataagcca

SEQ ID NO: 15192 - RNA, 124 nt, Aeromonas sp.
  source 1..124: mol_type = other RNA; note = Related to JAGDEY010000009.1; note = Aeromonas veronii
cggcttatgggcagattttggatcgcggatcgcgatcagtgaaaataatgtccggaaggacttgcctttgcgacttggcgagtcgcgctacacgagatgagtgcgtaggagtgcccataagcca

SEQ ID NO: 15193 - RNA, 125 nt, Aeromonas sp.
  source 1..125: mol_type = other RNA; note = Related to NZ_UETN01000024.1; note = Aeromonas allosaccharophila
cggcttatgggcagattttgggtcgcggatcgcgatcagtgaaaacaatgtccgaaaggacttgccttgtgcgacttggcgagtcgctatgctcgaaatgagtgcgaaggagtgcccataagcca

SEQ ID NO: 15194 - RNA, 126 nt, Pseudomonas sp.
  source 1..126: mol_type = other RNA; note = Related to JACAQA010000043.1
tggcttatgggcagattttggatcgcgtatcgcgatcagtggaaaaattgtccgaaaggattgccccctatgagacttgtcgcttcttgacagtccctacagtagcgtaagagtgcccataagcca

SEQ ID NO: 15195 - RNA, 124 nt, Pseudomonas sp.
  source 1..124: mol_type = other RNA; note = Related to POEK01000001.1
tggcttatgggcagattttggatcgcgaatcgcgatcagtgggaaaaatgttggaatgctttgcccggtgagaattgtcatgtcttgaggttctctacgtttgcgaaagagtgcccataagcct

SEQ ID NO: 15196 - RNA, 127 nt, Pseudomonas sp.
  source 1..127: mol_type = other RNA; note = Related to NZ_LT629790.1; note = Pseudomonas mediterranea
cggcttacgggcagattttggatcgcgcatcgcgatcagtgaaaaaattgtccgaaaggattgcccttgtagtgacttgtcgattcttgacggtcctggcacagtgcgtaggagtgcccgtaagccc

SEQ ID NO: 15197 - RNA, 127 nt, Pseudomonas sp.
  source 1..127: mol_type = other RNA; note = Related to JAJSQA010000022.1; note = Pseudomonas monteilii
cggcttacgggcagattttggatcgcgcatcgcgatcagtgaaaaaattgtccgaaaggattgcccttgtggtgacttgtcgcttcttgacggtcctggcagagtgcgtaggagtgcccgtaagccc

SEQ ID NO: 15198 - RNA, 127 nt, Pseudomonas sp.
  source 1..127: mol_type = other RNA; note = Related to NZ_CP076652.1; note = Pseudomonas savastanoi
cggcttacgggcagattttggatcgcgcatcgcgatcagtgaaaaaattgtccgaaaggattgcccttgtggtgacttgtcgcttcttgacggtcctggcacagtgcgtaggagtgcccgtaagcca

SEQ ID NO: 15199 - RNA, 125 nt, Pseudomonas sp.
  source 1..125: mol_type = other RNA; note = Related to NZ_JAHTKI010000003.1; note = Pseudomonas botevensis
cggtttacgggcagattttgggtcgcgcatcgcgatcagtgaaaaaattatccgaaaggattgcccttgagatgacttagcgattcttcgcggtcctggtaatgcgtaagagtgcccgtaagcca

SEQ ID NO: 15200 - RNA, 125 nt, Pseudomonas sp.
  source 1..125: mol_type = other RNA; note = Related to NZ_LN854573.1
cggcttacgggcagattttgggtcgcgtatcgcgaccagtgaaaccattgtccgaaaggattgcccttgtggagacttgtcgattcttgacggtcctggcggtgcgtaggagtgcccgtaagcca

SEQ ID NO: 15201 - RNA, 126 nt, Pseudomonas sp.
  source 1..126: mol_type = other RNA; note = Related to NZ_VLKY01000029.1; note = Pseudomonas duriflava
cggcttacgggcagattttgggtcgcgcatcgcgatcagtgaaaaaatggtccgaaaggattgcccttggtggagactcatcgattctctacggtcctggcagtgcctaggagtgcccgtaagccg

SEQ ID NO: 15202 - RNA, 126 nt, Pseudomonas sp.
  source 1..126: mol_type = other RNA; note = Related to NZ_CP044074.1; note = Pseudomonas oryzihabitans
tggcttacgggcagattttgggtcgcgtatcgcgatcagtgaaaaaatggtccgaaaggattgccctttgtggagacttgtcgattctctacggtcctggctgtgcctaggagtgcccgtaagcca

SEQ ID NO: 15203 - RNA, 128 nt, unidentified
  source 1..128: mol_type = other RNA; note = Related to NZ_PNRF01000034.1; note = Halomonas endophytica
tggcttatgggtagattttggatcgcgtatcgcgatcagtgaaaaaattgtccgaatggattgccctttgaacaatatgtcatatcttaaatgttccttgacgtttgcaaaagagtacccataagcca

SEQ ID NO: 15204 - RNA, 128 nt, unidentified
  source 1..128: mol_type = other RNA; note = Related to QOAT01000087.1; note = Thiothrix sp.
cggcttatgggcagattttgggtcgcgaatcgcgatcagtgaaaataatgtccatttggattgcctttaatggtgactatgcgtatcaagtatgatccattgcagtgcgaaagagtgcccataagcca

SEQ ID NO: 15205 - RNA, 128 nt, unidentified
  source 1..128: mol_type = other RNA; note = Related to JAHJJI010000033.1; note = Gammaproteobacteria bacterium
tggcttatgggcagattttgggtcgcgcatcgcgatcagtgaaaaaaatgtccgtctggattgcccttaacagtgattatgcttactcgataatctcattgacagtgcaaaagagtgcccataagcct

SEQ ID NO: 15206 - RNA, 128 nt, unidentified
  source 1..128: mol_type = other RNA; note = Related to NVWS02000073.1; note = Zetaproteobacteria bacterium
cggcttatgggcagattttgggtcgcggatcgcgatcagtgaaaacaatgtccgaaaggattgcctacggaagtgatatacgcaacttaatatcctccatgctggtgcgtaagagtgcccataagcca

SEQ ID NO: 15207 - RNA, 129 nt, unidentified
  source 1..129: mol_type = other RNA; note = Related to NZ_BDMN01000304.1
cggcttataggcagattttgggtcgtgtatcgcgaccagtgaaaaaaatatccggacggattgccccttaaaagttctctacagattaactagagaatacgtattacgcataagagtgcctataagcca

SEQ ID NO: 15208 - RNA, 128 nt, unidentified
  source 1..128: mol_type = other RNA; note = Related to NZ_VTUU01000001.1; note = Marinobacter salinexigens
tggcttatgggcagattttggatcgcggatcgcgatcagtggaaaaaatgtcccagtacattgcccttaagattgcgtctcgtaatgctgcagtctcccccagggtgcgtaggagtgcccataagcca

SEQ ID NO: 15209 - RNA, 127 nt, Aeromonas sp.
  source 1..127: mol_type = other RNA; note = Related to NZ_CP045311.1; note = Aeromonas dhakensis
tggcttatgggcagatttttgactttgtttcggagtctgtgaaaaaaatgtccgctggactgccccctaagcgatatcaccgccacgccgagatgtcgcgcgcttgcgtaggagtgcccataagcca

SEQ ID NO: 15210 - RNA, 127 nt, Aeromonas sp.
  source 1..127: mol_type = other RNA; note = Related to NZ_CP012504.1; note = Aeromonas veronii
tggcttatgggcagatttttgactttgtttcggagtctgtgaaaataatgtccgctggactgccccctaagcgatatcagcaccacgctgagatgtcgcgcgcttgcgtaggagtgcccataagcca

SEQ ID NO: 15211 - RNA, 131 nt, unidentified
  source 1..131: mol_type = other RNA; note = Related to JABXIW010000056.1; note = Gammaproteobacteria bacterium
aggtttatgggcagattttgggtcgcgtatcgcgatcagtgaaaagaatgtccgataggattgcctatagtaacgatatgactaatcatttatagtcatttgcataacagcgtaagagtgcccataaatct

SEQ ID NO: 15212 - RNA, 129 nt, unidentified
  source 1..129: mol_type = other RNA; note = Related to WOBJ01000032.1; note = Aliivibrio fischeri
cagcttacgggcagattttgggttgcgcatcgcaatcagtgaaaaaaatgtctgagagactcgcctttaatgtgatattacgtttcttcttaatatccctgactagtgcataggagtgcccgtaagcta

SEQ ID NO: 15213 - RNA, 128 nt, Vibrio sp.
  source 1..128: mol_type = other RNA; note = Related to NZ_JABEQC010000006.1; note = Vibrio plantisponsor
tagcttacgggcagattttgggttgcgtatctgcaatcagtgaaaaaaatgtcctagagacttgctttttggcgattatgctaatttttgataatccctgactagtgcgtaagagtgcccgtaagcta

SEQ ID NO: 15214 - RNA, 128 nt, Vibrio sp.
  source 1..128: mol_type = other RNA; note = Related to NZ_SMJS01000006.1; note = Vibrio echinoideorum
tagcttacgggcagattttgggtggcgtatcgccatcagtgaaaacaacgtctgatagacttgcctttataatgtaatgttcagtttctctatgatcctcgacatggcataggagtgcccgtaagcga

SEQ ID NO: 15215 - RNA, 125 nt, unidentified
  source 1..125: mol_type = other RNA; note = Related to NZ_CP028355.1; note = Shewanella baltica
tagcttacgggcagattttgggttgcgtatcgcaatcagtgaaaaaaatgtctgatagactcgccttatgaatagttacattacttctaatgtctctgactatgcgaaggagtgcccgtaagcta

SEQ ID NO: 15216 - RNA, 129 nt, Vibrio sp.
  source 1..129: mol_type = other RNA; note = Related to NZ_CAJFAE010000018.1; note = Vibrio jasicida
aagcttacgggcagattatgggttgcgaatcgcaatcagtgaaaaaaatgtccgagagactagcctttatcagggatgttacgtttcttgttctatccttgaccagtgcataagagtgcccgtaagcta

SEQ ID NO: 15217 - RNA, 128 nt, unidentified
  source 1..128: mol_type = other RNA; note = Related to WMDE01000033.1; note = Photobacterium carnosum
ttgcttacgggcagattttgggttgcgtatcgcaatcagtggaaaaaatgtcctagagactagcccttaactggaatttacgattcttctcgtatccttgtccagcgcataagagtgcccgtaagctc

SEQ ID NO: 15218 - RNA, 126 nt, Vibrio parahaemolyticus
  source 1..126: mol_type = other RNA; note = Related to CP040103.1
tggtttgcgggtagatcttgggttgcgtatcgcaatcagtgaaaacaatgtcgccaagactagccctttaacgatttgacggattctttccgattcacctcggtgcgaaagagtacccgcaaacca

SEQ ID NO: 15219 - RNA, 127 nt, unidentified
  source 1..127: mol_type = other RNA; note = Related to NZ_JAFFZP010000001.1; note = Amphritea pacifica
gggcctattggcagattttttggctgcgattcgcagtctgtgacaacaatgtctgaatctctcgccttcgcagttgaatggatcactatgtgactgcagcaatgagcgtaagagtgccaataggctc

SEQ ID NO: 15220 - RNA, 128 nt, unidentified
  source 1..128: mol_type = other RNA; note = Related to NZ_PYGI01000034.1; note = Marinobacterium halophilum
cagcctattggtagattttgggctgcgattcgcagtctttgacaaaaacgtccgaaacactcgccttcgcagttagatgcttacactatgtgaatgcatgcaatacgcgtaagagtaccaataggctc

SEQ ID NO: 15221 - RNA, 127 nt, Aeromonas sp.
  source 1..127: mol_type = other RNA; note = Related to NZ_CP077301.1
cggcttatgggcagattttggattgtgtttcgcaatcagtgaaaaaaatgtcccacaggactcgccatatggcggattgacgcagtgtcgattccgaatataagtgcataagagtgcccataagcct

SEQ ID NO: 15222 - RNA, 130 nt, unidentified
  source 1..130: mol_type = other RNA; note = Related to NZ_KB902175.1; note = Mariprofundus ferrooxydans
tggcttatgggcagattttggattgtgatatcgcaatcagtgaaaaaattgtccaatggactcgccccacgggtacgttaatttagcggatctgtgtaacttaagaatgcgtaagagtgcccataagcca

SEQ ID NO: 15223 - RNA, 134 nt, unidentified
  source 1..134: mol_type = other RNA; note = Related to JABWTG010000018.1; note = Desulfuromonas acetoxidans
acgcttatgggcagattttggattgcgtttctgcaatcagtgaaaaaatggtgtcgcatcattcgcccgatagcggcccttcaatgttactggtcacatgactaaaatagatgcgtaggagtgcccataagcac

SEQ ID NO: 15224 - RNA, 135 nt, unidentified
  source 1..135: mol_type = other RNA; note = Related to WJFN01000003.1; note = Morganella morganii
cagctcacatgcagatttgttggttgcgtttcgcaacctgtgacgacattgtctaagtgattcgccttctcggattgcgccattatagcgtatctgaattacctgctagccgcgcgtaagagtgcatgtgggcta

SEQ ID NO: 15225 - RNA, 131 nt, unidentified
  source 1..131: mol_type = other RNA; note = Related to NZ_QKLW01000003.1; note = Marinomonas alcarazii
cggctcacatgcagatttgctggttgcgtttcgcaacctgtgacaacatggtccaagtgactcgccttctaggatgctacattgcgttcttgaattactcgctagcggcgcgtaagagtgcatgtgagcta

SEQ ID NO: 15226 - RNA, 134 nt, unidentified
  source 1..134: mol_type = other RNA; note = Related to NZ_FOGS01000013.1; note = Halomonas subterranea
acgctcacatgcagatttgttgattgcgtttcgcaatctgtgacaacatcgtctaagtgactcgccttctcggattgctccatattgctttcctgaattactcgctagcggcgcgtaagagtgcatgtgagcta

SEQ ID NO: 15227 - RNA, 134 nt, unidentified
  source 1..134: mol_type = other RNA; note = Related to BMQV01000045.1; note = Shewanella saliphila
tggctcacatgcagatttgttggttgcgtttcgcaacctgtgacaacattgtccaagtgactcgccttctcggattgctccatattgctttcctgaattactcgctagcggcgcgtaagagtgcatgtgagcta

SEQ ID NO: 15228 - RNA, 133 nt, unidentified
  source 1..133: mol_type = other RNA; note = Related to NC_008750.1; note = Shewanella sp.
tagctcacatgcagatttgttggttgcgtttcgcaacctgtgacaacatggtccaagtgactcgccttctcggatcgcttcatatgctttcctgaatgactcgcccgcggcgcgtaagagtgcatgtgagcta

SEQ ID NO: 15229 - RNA, 133 nt, unidentified
  source 1..133: mol_type = other RNA; note = Related to BAEQ01000054.1; note = Glaciecola pallidula
atgctcacatgcagatttgttggttgcgtttcgcaatctgtgatgacattgtcaatttgactcgccttctcggaatagtctttgagctatcctgaagtacttgccagccgcgcgtaagagtgcatgtgagcac

SEQ ID NO: 15230 - RNA, 131 nt, unidentified
  source 1..131: mol_type = other RNA; note = Related to NZ_RXNU01000007.1; note = Shewanella canadensis
aggctcacatgcagatttgttggttgcgcttcgcaaccagtgaccacattgtctaagagactcgcctttcggattgctaatatgccttccggaactactcgccagctgcgcgaaagagtgcatgtgagccg

SEQ ID NO: 15231 - RNA, 133 nt, unidentified
  source 1..133: mol_type = other RNA; note = Related to NZ_RSFE01000007.1; note = Pseudidiomarina gelatinasegens
cggctcacatgcagatttgttggttgcgcttcgcaacctgtgacaacattgctagatagactcgcctttcggactactcgtttgagcgtcctggaactactcgccagccgcgcgtaggagtgcatgtgagcca

SEQ ID NO: 15232 - RNA, 131 nt, unidentified
  source 1..131: mol_type = other RNA; note = Related to NZ_JAGPNM010000010.1; note = Rheinheimera sp.
tggctcacatgcagatttgttggctgcgcttcgcagcctgtggcaaaattgtcagatagactcgcctttcggacaccatcaacacgtcctggaactactcgccagccgcgcgtaggagtgcatgtgggcca

SEQ ID NO: 15233 - RNA, 130 nt, unidentified
  source 1..130: mol_type = other RNA; note = Related to NZ_JADZGP010000013.1; note = Shewanella algae
cggctcacatgcagatttgtgggttgcgcttcgcaacctgtgacaacatggtctgatagactcgcctattcggattgcttatggctttctggaaatactcgctgcggcgcgtaggagtgcatgtgagcca

SEQ ID NO: 15234 - RNA, 131 nt, unidentified
  source 1..131: mol_type = other RNA; note = Related to NC_016745.1; note = Oceanimonas sp.
cggctcacatgcagatttgttggttgcgcttcgcaacctgtgacaacatggtccgatggactcgccttcttggatatcgcctagtcttgctggaaatactgctagcggcgcgtaggagtgcatgtgggcca

SEQ ID NO: 15235 - RNA, 133 nt, Aeromonas sp.
  source 1..133: mol_type = other RNA; note = Related to NZ_JRBE01000001.1; note = Aeromonas veronii
aggctcacatgcagatttgttgattgcgaagcgcaatctgtgttaacaatgtccgagtgactcgccttatcggattgcatattattcgatgtcgaatatattgctagccgcgccaaggagtgcatgtgggcct

SEQ ID NO: 15236 - RNA, 136 nt, Vibrio sp.
  source 1..136: mol_type = other RNA; note = Related to ABBKEB010000006.1; note = Vibrio vulnificus
cggctcacacacagatttgttggttgcgtttcgcaacctgtgaaaaaaacgtccgagtgactcgctatgtaatgattatcgttacgtatcattctgacagtacctgctggcagcgccaaagagtgtgtgtgagcca

SEQ ID NO: 15237 - RNA, 130 nt, Vibrio sp.
  source 1..130: mol_type = other RNA; note = Related to MAKF01000119.1; note = Vibrio splendidus
gggctcacatccagatttgttggttgcgtttcgcaacctgtgaaaaaaatgtccgagtgactcgccttttgattacaaattgtgcaggtagcaatatatcgcttatgcgcgtaagagtgaatgtgagccc

SEQ ID NO: 15238 - RNA, 132 nt, Vibrio sp.
  source 1..132: mol_type = other RNA; note = Related to CP016228.1; note = Vibrio crassostreae
tggcttatagacagacttttggttgtgtttcgcaacctgtgaaaaaaatgtccgtaggactcgctaatattactgtgctactagtgtaattgtaaacttatgccggcggcgcaagggagtgtctataagcct

SEQ ID NO: 15239 - RNA, 128 nt, unidentified
  source 1..128: mol_type = other RNA; note = Related to NZ_LR134189.1; note = Providencia rustigianii
gagtatgcaggcagattttttagttgtgtttcgcaactagtgaaaacaagggcagaatcgctcgctaatatgattaaagttgtaacgctatgatgagatttgatgcgcaaaggagtgcctgcatactc

SEQ ID NO: 15240 - RNA, 127 nt, unidentified
  source 1..127: mol_type = other RNA; note = Related to WLUH01000023.1; note = Providencia sp.
gagcatgcaggcagattttttagttgtgtttcgcaactactaaaaacaagggcaggatcgctcgccaatataatcataattgtaacgctatgataggtttgtaatgcaaaagagtgcctgcatgctc

SEQ ID NO: 15241 - RNA, 131 nt, Proteus sp.
  source 1..131: mol_type = other RNA; note = Related to JAGKMM010000039.1; note = Proteus mirabilis
gagcatgtaggcagattttgggattgtgtatcacaatcattgaaaacaacgggtggatatctcgcccactatgattctcatagtattcctagcgattaatcgtagctttgcataagagtgcttacatgctc

SEQ ID NO: 15242 - RNA, 133 nt, Proteus sp.
  source 1..133: mol_type = other RNA; note = Related to JH815505.1; note = Proteus mirabilis
tggtatgcaggcagatttttgaattgtgtttcgcaattcttgatttcaagggtagaagttctcgcctgctatgatgaatcatagcgtaatctgcttacaatatgtaaaagtgcgtaagagtgcctgcatacct

SEQ ID NO: 15243 - RNA, 131 nt, unidentified
  source 1..131: mol_type = other RNA; note = Related to NZ_CP086257.1; note = Providencia rettgeri
cggtatgcaggcagatttttgaattgtgcatcgcaattcttgattttaatggcgggatttctcgctgctatgatgaatcatagcataatatgctaagtatatgaaaagtgcgtaagagtgcctgcatacct

SEQ ID NO: 15244 - RNA, 133 nt, unidentified
  source 1..133: mol_type = other RNA; note = Related to NZ_JAJAVX010000005.1; note = Yersinia bercovieri
tggtgtgcaggcagatttttgaattgtgtttcgcaattcttgatttaaagggcagaaactctcgcctgctatgattctcatagcataatctgcttagaatattataaaagtgcataagagtgcctgcacaccg

SEQ ID NO: 15245 - RNA, 132 nt, unidentified
  source 1..132: mol_type = other RNA; note = Related to NZ_VOUX01000033.1; note = Serratia bockelmannii
cggtgtgcaggcagaattttgaattgtgtttcgcaattcttgatttcaagggctcaagctctcgctgctatgattctcatagcaggatttgctgggaatactgtaaaagtgcgtaagagtgcctgcacaccg

SEQ ID NO: 15246 - RNA, 132 nt, unidentified
  source 1..132: mol_type = other RNA; note = Related to NZ_CP067391.1; note = Klebsiella grimontii
tggtgtgcaggcagaattttgaattgtgtttcgcaattcttgatttcaagggctcaagctctcgctgctatgattctcatagcagtatttgctgataatattgtaaaagtgcgtaagagtgcctgcacactg

SEQ ID NO: 15247 - RNA, 133 nt, unidentified
  source 1..133: mol_type = other RNA; note = Related to UKYY01000005.1; note = Klebsiella pneumoniae
tggtgtgtgggcagaattttgaattgtgtttcgcaattcttgatttcaagggcagaacttctcgcctgctatgatcctcatagcttaatctgcttataatgctgtataagtgcgtaagagtgcctgcacaccg

SEQ ID NO: 15248 - RNA, 132 nt, unidentified
  source 1..132: mol_type = other RNA; note = Related to JAHVXV010000003.1; note = Pantoea allii
aggtgtgcaggcagatttttgaattgtgtttcgcaattcttgatttaaagggcagaaagtctcgcccgctatgattctcatagctatatctgcttagtatttttcaaagtgcataggagtgcctgcacacct

SEQ ID NO: 15249 - RNA, 131 nt, unidentified
  source 1..131: mol_type = other RNA; note = Related to CP003085.1; note = Pantoea ananatis
aggtgcgcaggcagatttttaggttgtgtttcgcaatcttttattttcaatgttacaagttctcgcctgctatgattctcatagcgtatcttgcggtcaacggttaaatgcataggagtgcccgcgcaccg

SEQ ID NO: 15250 - RNA, 131 nt, Citrobacter sp.
  source 1..131: mol_type = other RNA; note = Related to CP056336.1; note = Citrobacter freundii
aggcatgcaggtagatttttgggttgtggttcgcaatccttgatttcaacggcagaagttctcgccgctatgattctcatagctaatcagcttagaatggatcaaatacgcataggagtgcctgcatgccg

SEQ ID NO: 15251 - RNA, 131 nt, Escherichia coli
  source 1..131: mol_type = other RNA; note = Related to CP061264.1
acgcatgtaggcagatttgttggttgtgaatcgcaaccagtggccttaatggcaggaggaatcgcctccctaaaatccttgattcagagctatacggcaggtgtgctgtgcgaaggagtgcctgcatgcgt

SEQ ID NO: 15252 - RNA, 131 nt, Enterobacter sp.
  source 1..131: mol_type = other RNA; note = Related to NZ_QZCS01000001.1; note = Enterobacter chuandaensis
gcgcatgtaggcagatttgttggttgtgaatcacaaccagtgatctaaatggcaggaggtatcgcctccctgaaatccttgtttcgacgccataaggccacgatgctgtgcgaaggagtgcctacatgcgc

SEQ ID NO: 15253 - RNA, 131 nt, unidentified
  source 1..131: mol_type = other RNA; note = Related to NZ_JAJNQS010000015.1; note = Lelliottia nimipressuralis
gcgcatgtaggcagatttgttggttgtgtatcacaaccagtgattttaatggcaggtggaatcgcatccctgacatccttgtttcgtcgctataaggccattgtgctgtgcgaaggagtgcctacatgcgt

SEQ ID NO: 15254 - RNA, 129 nt, unidentified
  source 1..129: mol_type = other RNA; note = Related to NZ_CP084222.1; note = Arsenophonus sp.
gcgtatgtaggtagatttgttggttgtgtatcgcaaccggtcattttaatggcgggaactctcgctttccttgaattgttctaatggcaatgcggtaattaagctgcgcgaaagagtacctacatacgt

SEQ ID NO: 15255 - RNA, 128 nt, unidentified
  source 1..128: mol_type = other RNA; note = Related to QKNL01000001.1; note = Klebsiella pneumoniae
gcgcgtgtaggcagatttgttgattgtgaatcgcaatcagtgaccgcaatgttagggggtttcgcccgataacagctttgagtcgccgccagatggattatgcggtgcgaaggagtgcctgcatgcgc

SEQ ID NO: 15256 - RNA, 129 nt, Escherichia coli
  source 1..129: mol_type = other RNA; note = Related to AP022044.1
gcacatgcaggtagatttgttggttgtggtatcgcaatcagtgttaacaaggtcgggagtattcgccctctgactgccgtcaagtcatcttggcgtcaccgttaaatgcgtaagagtacctgcatgtgc

SEQ ID NO: 15257 - RNA, 132 nt, unidentified
  source 1..132: mol_type = other RNA; note = Related to CP047281.1; note = Klebsiella quasipneumoniae
gcacataggggcagatttgtaggttgtggtatcgcagcctgtgatctaaatgtgagagggactcgccttctgacatccttgtttcatcgtttcgtataactctatgctttgcgtaagagtgcccctatgtgt

SEQ ID NO: 15258 - RNA, 131 nt, unidentified
  source 1..131: mol_type = other RNA; note = Related to WBVV01000002.1; note = Klebsiella pneumoniae
gcacatgtaggcagatttgttggttgtggtatcgcaatcagtgatctaaatgttagatggattcgccttctgacatccttgtagccattcttgggctgtcctatgctttgcgtaagagtgcctacatgtgc

SEQ ID NO: 15259 - RNA, 129 nt, unidentified
  source 1..129: mol_type = other RNA; note = Related to JAGOYO010000023.1; note = Vitreoscilla sp.
gggtatgcagatagattattaggttgtgcttcacaaccttttttaaaatattaggccaagttggtactaggcttcatttacacctacgtcaaattacttgacgctacgcaaaagagtgtctgcataccc

SEQ ID NO: 15260 - RNA, 146 nt, Bacillus sp.
  source 1..146: mol_type = other RNA; note = Related to CP024204.1; note = Bacillus altitudinis
aaacgtgtggctagattattcgcttgtgtttcgcaagtgttgaccaaaatggtaggagcattagcttctgctattcgtattactattggtgtatttacgttaaattttcaatgtttctgcatcgcataatgagtagccacacgttc

SEQ ID NO: 15261 - RNA, 144 nt, Bacillus sp.
  source 1..144: mol_type = other RNA; note = Related to JH791914.1; note = Bacillus cereus
aaacgtgtggctagattttttcgcttgtgtttcgcaagtgttgacaaaaatggtgggagcattagcttttctcatccgcatgatcacgttggtatatttttcgatgtacccggcctgcatcgcctaatgagtagccacacgttt

SEQ ID NO: 15262 - RNA, 145 nt, unidentified
  source 1..145: mol_type = other RNA; note = Related to JACWFJ010000008.1; note = Cytobacillus firmus
ttacgtgtggctagattttttcgcttgtgtttcgcaagtgttgacaaaaatggtgggaacattagcttctcctatcctaacttagcatgatcgtatatttatcgatttggtcgattttgtccgcataatgagtagccacacgttt

SEQ ID NO: 15263 - RNA, 143 nt, unidentified
  source 1..143: mol_type = other RNA; note = Related to NZ_ML122604.1; note = Rummeliibacillus sp.
agtcgtgtggctagactttttcgcttgtgtttcgcaagtgttgacaaaaatggtaggaggattagcttctattattcttaatatttaccggattttatataaatctattagtttttcactgcataatgagtagccacacgctt

SEQ ID NO: 15264 - RNA, 146 nt, Bacillus sp.
  source 1..146: mol_type = other RNA; note = Related to NFCM01000080.1; note = Bacillus thuringiensis
taacgtgtggctagattttttcgcttgtgcttcgcaagtgttgacaataatggtgggagcattcgcttctccgattctaattatccgcatggaggtatcttctaaggtaaactcgccgcctctgcctaatgagtagccacacgttt

SEQ ID NO: 15265 - RNA, 146 nt, Bacillus sp.
  source 1..146: mol_type = other RNA; note = Related to NZ_CP015611.1; note = Bacillus safensis
taacgtgtggctagattttttcgcttgtgtttcgcaagtgttgacaataaaggtgggagcattcgcttctccgattctaactatctacttggaggtaacttttacggtaaactcgacgcctctgcataatgagtagccacacgttt

SEQ ID NO: 15266 - RNA, 140 nt, Bacillus sp.
  source 1..140: mol_type = other RNA; note = Related to CP048002.1; note = Bacillus velezensis
tagcgtgtggctagatctttttgcttgtgtttcgcaagtgttgactaaaatggtgagaacatttgcttctcctattatcatattggtgtattattcgccgatgtatccgatattaccgcataatgagtagccacacgttt

SEQ ID NO: 15267 - RNA, 147 nt, Bacillus sp.
  source 1..147: mol_type = other RNA; note = Related to CP048852.1; note = Bacillus tequilensis
atgcgtgtggctagattttttcgcttgtgtttcgcaagtgttgacaaaaatggtagaggcatttgcttctccgactctccgtattaccatgtcggtaaatttgctgatgtgtacagttttcaacgcctaatgagtagccacacgtta

SEQ ID NO: 15268 - RNA, 149 nt, unidentified
  source 1..149: mol_type = other RNA; note = Related to JADPRZ010000022.1; note = Sporosarcina sp.
atgcgtgtggctagatttttttcgcttgtgtttcgcaagtgttgacaaaaatggtgggaacattagcttctcctattcctaatacttatcatgtcggtatatttaccgatttatccgattagcttcgcataatgagtagccacacgttt

SEQ ID NO: 15269 - RNA, 147 nt, unidentified
  source 1..147: mol_type = other RNA; note = Related to NZ_LQYA01000064.1; note = Sporosarcina koreensis
aaacgtgtggctagattttttcgcttgtgtttcgcaagtgttgacaaaaatggtgggagcattagcttctactattccaatatttatcatgtcggtatggttgccgatatgtcctattagcttcgcataatgagtagccacacgttt

SEQ ID NO: 15270 - RNA, 147 nt, unidentified
  source 1..147: mol_type = other RNA; note = Related to NZ_QRDZ01000063.1; note = Cohnella phaseoli
aaacgtgcggctagatttttcacttgtgcttcgcaagtgttgtcaaaaatggtggggatatttgctctctctcatataagcggtgtttgccgaagtagttgtctcttatcatcgcgttttcatcgcataatgagtagccgcacgtac

SEQ ID NO: 15271 - RNA, 144 nt, unidentified
  source 1..144: mol_type = other RNA; note = Related to NZ_CP073365.1; note = Paenibacillus tritici
aaacgtgcggctagatttttcacttgtgcttcgcaagtgttggcataaatggtgggattgtttgcttcctctcatattagtattagccgtaatagtcatctcttatcatcgcgttttcatcgcataaggagtagccgcacgtac

SEQ ID NO: 15272 - RNA, 146 nt, unidentified
  source 1..146: mol_type = other RNA; note = Related to NZ_BMEY01000002.1; note = Ornithinibacillus halotolerans
aagcgtgtggctagatttttcgcttgtgtttcgcgagtgttggcaataatggttgggagattagcttctccgtactatcatgtattatcatgtatgagcaatgttgatatattgatcatgttcgcctaatgagtagccacacgtat

SEQ ID NO: 15273 - RNA, 145 nt, unidentified
  source 1..145: mol_type = other RNA; note = Related to FNNT01000003.1; note = Paenibacillus sp.
atgcgtgtggctagatctttcgcttgtgtttcgcaggcgttaacaaaaatgtcgggaggatttgcttctctctattctatttttatcgttttatgatattcgctaatttgatcggattaatcgcataatgagtagccacacgtgt

SEQ ID NO: 15274 - RNA, 138 nt, unidentified
  source 1..138: mol_type = other RNA; note = Related to JAIEZV010000001.1; note = Halobacillus sp.
tagcgtgtggctagatttttcgcttgtgcttcgcaagcgttgacaataatggtgggaacattagcttctcgtattctattaaatttgactatttggtcgttttattagcatgatcgcataatgagtagccacacgtta

SEQ ID NO: 15275 - RNA, 136 nt, unidentified
  source 1..136: mol_type = other RNA; note = Related to NZ_RBVX01000055.1; note = Salibacterium salarium
aaacgtgtggctagattttattacttgtgtttcgcaagtagtgacaaaaatggtgggcacattcgctgtcgtcattctatcgatcatctatcgctttatgatcgctttgcttcgcttaaggagtagccacacgttt

SEQ ID NO: 15276 - RNA, 124 nt, unidentified
  source 1..124: mol_type = other RNA; note = Related to LFJO01000006.1; note = Alkalihalobacillus pseudalcaliphilus
ttgcgtgtggctagatttttttggcttgtgtatcgcaagcgtttacaacaatggtggggacatttgctttcctattattctattattatccgctattaattgcttaatgagtagccacacgtac

SEQ ID NO: 15277 - RNA, 148 nt, Bacillus sp.
  source 1..148: mol_type = other RNA; note = Related to NVIC01000027.1; note = Bacillus toyonensis
aatcgtgtggctagattattcgacttgtgtttcgcaagtcttatcaggaagggggggagcttttgcttctcttccacatttacttagtagtctttgcttactatgctattttgctattttgcttcgcgtaaggagtagccacacgttt

SEQ ID NO: 15278 - RNA, 141 nt, Bacillus sp.
  source 1..141: mol_type = other RNA; note = Related to NVFR01000056.1; note = Bacillus toyonensis
aatcgtgtggctagagtatttgacttgtgtttcgcaagttttgtcaagaaagtggggggcgtttgccctctctattaagtttacttagtagtctttatttactaaactatttagcttcgcctaaggagtagccacacgttt

SEQ ID NO: 15279 - RNA, 126 nt, unidentified
  source 1..126: mol_type = other RNA; note = Related to NC_016894.1; note = Acetobacterium woodii
atgcacgcggctagattttgtgtctgtggttcgcagacgttgaaaaaaatgtgggggacttttgcttactacatcaatttaaattatttgccataataatttgtcataatgagtagccgcgtgcac

SEQ ID NO: 15280 - RNA, 140 nt, unidentified
  source 1..140: mol_type = other RNA; note = Related to NZ_AP024845.1; note = Eubacterium sp.
aaacgtgtggttagattatggacttgtgtttcgcaagtattggtgaaaatggtaggaagatatgctctctatcaatctgtattatgcttatgtatattttattatatattacgcatcgcataatgagtaaccacacgttt

SEQ ID NO: 15281 - RNA, 129 nt, unidentified
  source 1..129: mol_type = other RNA; note = Related to JAAYPT010000052.1; note = Clostridiales bacterium
aagcgtgtggttagattgtggacttgtgtttcgcaagtgttgactaaaatggtaggaagatatgctctcttatcaatccattctatgtgtatgtatattacgcattgcataatgagtaaccacacgttt

SEQ ID NO: 15282 - RNA, 142 nt, unidentified
  source 1..142: mol_type = other RNA; note = Related to NZ_LT727777.1; note = Oceanobacillus iheyensis
atacgtgtggcaagattttattgcttgtgtttcgcaagtattgactcaaatggtggaaacatttgctactcggataggttgacggtgagtagtatactagttggctacttgtctgcttcgcataatgagttgccacacgtat

SEQ ID NO: 15283 - RNA, 129 nt, unidentified
  source 1..129: mol_type = other RNA; note = Related to JAJCRR010000003.1; note = Lachnospira pectinoschiza
atgcgtgtggctagatttttggcttgtgtttcgcaagctttgatggaaatggtaggaggatttgcagaaatatacgcccttccgtcctgtgtataaagggaaaaatgcataatgagtagccacacgctt

SEQ ID NO: 15284 - RNA, 126 nt, unidentified
  source 1..126: mol_type = other RNA; note = Related to JAFTZX010000234.1; note = Lachnospiraceae bacterium
atgcgtgtggctagattttttgcttgtgtttcgcaagtgttgatagcaatggtggggagactcgcacacattaatcgatactattcgatgtaatccgtttaggtgataatgagtagccacacgcaa

SEQ ID NO: 15285 - RNA, 140 nt, unidentified
  source 1..140: mol_type = other RNA; note = Related to NZ_FNYT01000006.1; note = Trichococcus ilyis
acgcgtgtggttagatttttggcttgtgcttcgcaagccttgactcaaatggtggtaagatttgcttatcctatgagcatccttgattatccgtatactattgcacaatatgcttttgcataatgagttgccacacgctt

SEQ ID NO: 15286 - RNA, 145 nt, unidentified
  source 1..145: mol_type = other RNA; note = Related to NZ_WIQQ01000012.1; note = Pectinatus frisingensis
cagcgtgcggttagattttgggcttgtgtttcgcaagctttgagaaaaatggtagagagactagctactatattcgtttttaaagttgtccattgttatttcttggtaataactatgttttagcataatgagtagccgcacgcaa

SEQ ID NO: 15287 - RNA, 143 nt, unidentified
  source 1..143: mol_type = other RNA; note = Related to SAAV01000006.1; note = Clostridia bacterium
gagcgtgtggtaagattttgtgcttgtgtttcgcaagtgttgactaaaatggtagagtcgtttgctctcatccatgttgccgtattatgcaatatgtgttctagtgttcagtgtagcattgcttaatgagttgccacacgctc

SEQ ID NO: 15288 - RNA, 129 nt, unidentified
  source 1..129: mol_type = other RNA; note = Related to KE136354.1; note = Enterococcus dispar
tagtgtgtggctagattttgtacttgtgtttcgcaagttttgacaaaattgctagggagaatagccttagtaatccgcaatttatgatcctttttctacgcagtgggcctaatgagtagccacgcacga

SEQ ID NO: 15289 - RNA, 173 nt, unidentified
  source 1..173: mol_type = other RNA; note = Related to NZ_MPSN01000002.1; note = Ligilactobacillus murinus
taacatgcgactagattttggacttgtgcgttcgcaagtattgattaaaatggggggacgatttgcctcattcatcgaccgtaagaaaagaattaatcatatgggtcatgccaattatcggttactgtataaatgtaagctatattggtggcataatgagtagtcgcatgttt

SEQ ID NO: 15290 - RNA, 131 nt, unidentified
  source 1..131: mol_type = other RNA; note = Related to NZ_NGLI01000001.1; note = Enterococcus sp.
ttgcgtgtggctagattttgtacttgtgtttcgcaagtattgattaaattgctagggacaatagccagtaggtataagggtgtttaacctttttcttcgcatatttcagcctaatgagttgccacacgctt

SEQ ID NO: 15291 - RNA, 130 nt, unidentified
  source 1..130: mol_type = other RNA; note = Related to JAARYB010000009.1; note = Listeria booriae
atgcgtgtggctagattattgatatgtgtttcgcatatcttgagaaaatggctgggaaggaaagctactattcgaaacgcgtctatagcgttttgcctctgtgttttgcctagtgagttgccacacgcta

SEQ ID NO: 15292 - RNA, 136 nt, unidentified
  source 1..136: mol_type = other RNA; note = Related to CP022488.1; note = Enterococcus faecalis
tggcgtgtggctagattttgtacttgtgattcgcaagttttgattaaaatgttggtagctatagctattagacagcctttaagtatataagcaatcttttatgctagtgtcgtgcctaatgagttgccacatgcta

SEQ ID NO: 15293 - RNA, 130 nt, unidentified
  source 1..130: mol_type = other RNA; note = Related to NZ_CP011102.1; note = Listeria weihenstephanensis
atgcgtgtggctagattttgcacttgtgattcgcaagttttgattaaatagctgggaattctagcttctttgtactatatttttcagcaattttctacgctgaatgagcctaatgagttgccacacgcta

SEQ ID NO: 15294 - RNA, 143 nt, unidentified
  source 1..143: mol_type = other RNA; note = Related to NZ_MAEJ01000004.1; note = Enterococcus sp.
gtgcgtgtggcaagattttttgacttgtgtttcgcaagttatgacaaaaagggtagctagtaagcatgcctccaataccatagcgacaatatataatgagttgtttaccgaccatgcttcgcataatgagttgccacacgctt

SEQ ID NO: 15295 - RNA, 142 nt, unidentified
  source 1..142: mol_type = other RNA; note = Related to NRQF01000015.1; note = Carnobacterium divergens
tggcgtgtggctagattttgtacttgtgcttcgcaagtattgacaaaaatggtaggaagtttagctgtcatcaatagttatttgagcattgggaaatatatctgctcagcattttagaggcctaatgagttgccacacgctt

SEQ ID NO: 15296 - RNA, 151 nt, unidentified
  source 1..151: mol_type = other RNA; note = Related to NZ_NFIW01000013.1; note = Megamonas hypermegale
aagcgtatggttagattgtggacttgtgtttcgcaagtattgaaataaaaggtaagtatacaagctgccttcatgtaaactatttagggcgtataagtttatataaagcttatctatcttaatgtattgcgtaatgagtaaccatacgcat

SEQ ID NO: 15297 - RNA, 152 nt, unidentified
  source 1..152: mol_type = other RNA; note = Related to CP024698.1; note = Fusobacterium sp.
atgtgtgtggttagattttttacttatgtttcgtaagtattgactaaaatgttagaaagttttgctaatgttgtgcaaattactcatagcttcatctaacttaataattctatttattatatttaaatcgcttaatgagttgccacacactt

SEQ ID NO: 15298 - RNA, 156 nt, unidentified
  source 1..156: mol_type = other RNA; note = Related to NZ_CP068114.1; note = Fusobacterium canifelinum
aagcgtgtggttagattttttacttatgcaattcgtaagtatttactaaaatgttagggcattttgctctaatagtatgctaacttaattagcttcatttgactaattctattattatcattaatttgatatcgcttaatgagttgccacacgctt

SEQ ID NO: 15299 - RNA, 140 nt, unidentified
  source 1..140: mol_type = other RNA; note = Related to JAGAAC010000102.1; note = Clostridia bacterium
aggcgtgtggttagattctgcgcttgtgtttcgcaagtgttgactaaaatgttatgacttgattctctttagcactgtatgatttaagcgcttattcaggcggttacagttcataatgcataatgagtaaccacacgcct

SEQ ID NO: 15300 - RNA, 129 nt, Bacillus sp.
  source 1..129: mol_type = other RNA; note = Related to NVHA01000086.1; note = Bacillus toyonensis
gaatgtgtggttagattttttaacttgtgcttcgcaagttttgacaaaaatggtaggaagacttgtttccgcctcgtagtgtaccgatattaatcgatcctgtagaacgtaatgagtaaccacacgttc

SEQ ID NO: 15301 - RNA, 130 nt, Bacillus sp.
  source 1..130: mol_type = other RNA; note = Related to NTTM01000084.1
gaatgtgtggttagattttttaacttgtgcttcgcaagttttgacgaaaatggtaggaagacttgttttccgcctcgtagtgtaccgatagttatcgatcctgtagaacgtaatgagtaaccacacgttc

SEQ ID NO: 15302 - RNA, 134 nt, unidentified
  source 1..134: mol_type = other RNA; note = Related to NZ_CP071798.1; note = Sporosarcina sp.
taacgtgtggttagattttttaacttgtgcttcgcaagttttgacaaaaatggtggggatacttgtttccgcctcatattctaatatacgataacgtatatatcctgaggaacgtaatgagtaaccacacgttc

SEQ ID NO: 15303 - RNA, 135 nt, unidentified
  source 1..135: mol_type = other RNA; note = Related to JPUW01000004.1; note = Lysinibacillus sp.
taacgtgtggttagatttttaacttgtgcttcgcaagttttgacaaaaatggtagggagatttgttccttattcatcatataattgtaccgtatggtgccgattcctatagaacgtaatgagtaaccacacgttc

SEQ ID NO: 15304 - RNA, 129 nt, unidentified
  source 1..129: mol_type = other RNA; note = Related to VHRP01000005.1; note = Enterococcus faecalis
aaacgtgtggttagatttttgacttgtgattcgcaagttttgacaacaatggtaggaagttttgtttccttatatatcatgcacaatggtacctgtaccctatagaacgtaatgagtaaccacacgttc

SEQ ID NO: 15305 - RNA, 143 nt, unidentified
  source 1..143: mol_type = other RNA; note = Related to NZ_CP046022.1; note = Enterococcus faecalis
ggacgtgtggttagatttttgacttgtgattcgcaagttttggcaataatggtagagtggtttgttctctgtactccataacaaaggtttccggagtaaccgtcggatacctataaaagaacgtaatgagtaaccacacgttc

SEQ ID NO: 15306 - RNA, 129 nt, unidentified
  source 1..129: mol_type = other RNA; note = Related to CP076644.1; note = Listeria monocytogenes
agacgtgtggttagattttcaacttgtgtttcgcaagttttgataaaaacggtagaaagacttgttcattagccttactgtaccataggcgctattgcctataaaacgtaatgagtaaccacacggtct

SEQ ID NO: 15307 - RNA, 141 nt, Bacillus sp.
  source 1..141: mol_type = other RNA; note = Related to NZ_CP009684.1; note = Bacillus subtilis
gaacgtgtggttagattttttaacttgtgtttcgcaagttttgacaaaaatggtagggagatttgttccttattactcgtataattgtattgtatcgtatagtttcgattcctatagaacgtaatgagtaaccacacgttc

SEQ ID NO: 15308 - RNA, 131 nt, unidentified
  source 1..131: mol_type = other RNA; note = Related to NZ_PYWN01000149.1; note = Metasolibacillus meyeri
gaatgtgtggttagattttcaacttgtgtttcgcaagttttgacaaaaatggtagggagatttgttccttattcatcataatgtaccgtatggtgcagattccttagaacgtaatgagtaaccacacgttc

SEQ ID NO: 15309 - RNA, 136 nt, unidentified
  source 1..136: mol_type = other RNA; note = Related to JAARXI010000004.1; note = Listeria booriae
aagcgtgtggctagattttttacttatgattcgtaagtattgactaaattggcagaatcaattgctgcatttattagcctgtctcaattttgcatatccgtgttgcatattgcgcataatgagttgccacacgcct

SEQ ID NO: 15310 - RNA, 137 nt, unidentified
  source 1..137: mol_type = other RNA; note = Related to NZ_KE386795.1; note = Veillonella magna
agacgcatgagaagattttttgcttgtgattcgcaagcattgacaaaaaagtgcacatcgcgcttctgtgccaaattaatgatactcaatagtttatgagtagtttatagtttagcctaatgagttctcgtgcgtct

SEQ ID NO: 15311 - RNA, 144 nt, unidentified
  source 1..144: mol_type = other RNA; note = Related to NFKI01000003.1; note = Pseudoflavonifractor sp.
gagcgtgtggcaagattttgtacttgtgtttcgcaagtgttgaccaaactgggtggtgctttagcgtattgccctttcccgttatgatgttaacatgttcatcatgttgactaatccgtccgcataatgagttgccacacgctc

SEQ ID NO: 15312 - RNA, 145 nt, unidentified
  source 1..145: mol_type = other RNA; note = Related to JAGZJF010000013.1; note = Oscillospiraceae bacterium
gagcgtgtggcaagattttgtacttgtgtttcgcaagtgttgaccaaactgggtggtgctttagcgtattgccctttcctgccatgatgttactcgtgttcatcatgttgactaatccgtccgcacaatgagttgccacacgctc

SEQ ID NO: 15313 - RNA, 146 nt, unidentified
  source 1..146: mol_type = other RNA; note = Related to NZ_JACOEA010000001.1; note = Intestinimonas sp.
gagcgtgtggcaagattttgtacttgtgtttcgcaagtgttgactaaactgggtggcgctttagcgtattgcccttccctgccatgatgttactcgtgttagctcatgtcgacttgtcctttcgcacaatgagttgccacacgctc

SEQ ID NO: 15314 - RNA, 146 nt, unidentified
  source 1..146: mol_type = other RNA; note = Related to QUKQ01000046.1; note = Ruminococcaceae bacterium TF06-43
gagcgtgtggcaagattttgtacttgtgtttcgcaagtgttgactaaactgggtggcacattagcgtattgccctttctttccatgatgttaactgtgttaactcatgttgactgatcctttcgcacaatgagttgccacacgctc

SEQ ID NO: 15315 - RNA, 149 nt, unidentified
  source 1..149: mol_type = other RNA; note = Related to NZ_CP035283.1; note = Caproiciproducens sp.
tagcgtgtggcaagattttgtgcttgtgtctcgcaagcgttgataaaaatggtaggcacgtttgcttatcactctatttctacatgttgtacgctgatagtatcgctgtacatcatgcatcatcccgcataatgagttgccacacgctt

SEQ ID NO: 15316 - RNA, 147 nt, unidentified
  source 1..147: mol_type = other RNA; note = Related to JAGAWV010000307.1; note = Acidaminococcaceae bacterium
aaacgtgtggcaagattttgagcttgtgtttcgcaagctttgacgaaaatggtgcattagcgtctatcagctgttgaccgtccttgtgttatgcgatgtaagcttgttctgttcgcacactcttgcataatgagttgccacacgttt

SEQ ID NO: 15317 - RNA, 133 nt, unidentified
  source 1..133: mol_type = other RNA; note = Related to JAHAER010000020.1; note = Firmicutes bacterium
aagcgtatggcaagattttttgtttgtgtttcgcaaacattgattaaacggatagagcatttgctggatttattacaaccagaagagaaacggacagagcgacgttttcagcctaatgagttgccatacgctt

SEQ ID NO: 15318 - RNA, 132 nt, unidentified
  source 1..132: mol_type = other RNA; note = Related to JAAYIN010000072.1; note = Clostridiales bacterium
aagcgtgtggcaagattttgtacttgtgtttcgcaagtgttgataaaaatggttgggggaattgcctaaatcaaatgccgctgacgatcaaacaaaactaaatgcttcggcataatgagttgccacacgcct

SEQ ID NO: 15319 - RNA, 145 nt, unidentified
  source 1..145: mol_type = other RNA; note = Related to JAJCJJ010000005.1; note = bacterium 210917-DFI.7.65
aagcgtgtggcaagatcatgtgcctgtgtttcgcaagcgttgacgaaaatgccggggagatttgcttccttgtatcattttcctgcataaaacagcagaaaacaatgagggctggtgtgctcgcgtaatgagttgccacacgctt

SEQ ID NO: 15320 - RNA, 131 nt, unidentified
  source 1..131: mol_type = other RNA; note = Related to SVGI01000005.1; note = Clostridiales bacterium
aagcgcatggcaagattttgtgcttgtgtttcgcaagtgttgacaaaaatgttcggggcatttgcttcgtcgtgcaatccctgaaaacctgtatacgcgtttgcgtttgcttaatgagttgccatgcgccc

SEQ ID NO: 15321 - RNA, 130 nt, unidentified
  source 1..130: mol_type = other RNA; note = Related to BK026599.1; note = Siphoviridae sp.
aagcgtatggcaagatttttggcttgtgtttcgcaagcgttgactaaaatggtgggagcatttgcgtctttccatgcttcgtcgcctctttaatctctgtaaatttcgcataatgagttgccatacgctg

SEQ ID NO: 15322 - RNA, 132 nt, unidentified
  source 1..132: mol_type = other RNA; note = Related to NZ_NFJU01000007.1; note = Proposed Anaeromassilibacillus sp.
gagcacatggcaagattttgtactcgcggatcgcgggtgttgactaaaatggtggggactttagccctttatcattctttaatcgtaaacagggatagatacttttgctgcataatgagttgccatgtgctc

SEQ ID NO: 15323 - RNA, 134 nt, unidentified
  source 1..134: mol_type = other RNA; note = Related to BQOK01000001.1; note = Oscillospiraceae bacterium
gagcacatggcaagattttgtactcgcgtatcgcgagtgttgactaaaatggcaggggagttggctcctccatccgtttggccgttacccatacaaagagagaatctttttgcataatgagttgccatgtgctc

SEQ ID NO: 15324 - RNA, 134 nt, unidentified
  source 1..134: mol_type = other RNA; note = Related to DWWX01000035.1; note = Candidatus Gemmiger stercorigallinarum
gagcatatggcaagattttgtactcgcgcatcgcgggtgttgactaaaatggcaggaagtttagctctcctccatcatttcggcggtacagttgtaatcctggtcctccacgcataatgagttgccatgtgctc

SEQ ID NO: 15325 - RNA, 130 nt, unidentified
  source 1..130: mol_type = other RNA; note = Related to NZ_JHVL01000054.1; note = Clostridiisalibacter paucivorans
ttgcgtgtggctagagttttttgcttgtgtttcgcaagtattgataaaaaggttgggaatattcgcaactttctggctgtactattttaccacgtaatacatgttgtgcataatgagtagccacacgcaa

SEQ ID NO: 15326 - RNA, 148 nt, unidentified
  source 1..148: mol_type = other RNA; note = Related to JAFVVV010000369.1; note = Clostridia bacterium
gagcatatggcaagattttgggcttgtgtttcgcaagcgttgactaaaatggtaggggacttttgctctatcatcattttttgaaatggcttttatgtgtcttgatggcacttgtaccatttcgagcgtaatgagttgccatatgctc

SEQ ID NO: 15327 - RNA, 148 nt, unidentified
  source 1..148: mol_type = other RNA; note = Related to JAFYAQ010000001.1; note = Oscillospiraceae bacterium
gagcgtgtgacaagattttgggcttgtgtttcgcaagctttgattaaaatggtagatggatttgctatctatcgtcatttccagtactgttatgtttatgttctgtttacccgtatgcaccatccgcataatgagttgtcacacgctc

SEQ ID NO: 15328 - RNA, 144 nt, unidentified
  source 1..144: mol_type = other RNA; note = Related to ABABDZ010000001.1; note = Clostridium perfringens
tagtgtgtggctagattttttgcttgtgtttcgcaagtattgattttaatggtaggaacttttgctatcatctagattttagctagtatagctttattttagctagtaaaaattgcttttagcataatgagttgccacacacct

SEQ ID NO: 15329 - RNA, 126 nt, unidentified
  source 1..126: mol_type = other RNA; note = Related to AACDFA010000001.1; note = Campylobacter lari
catagcatgataagattttttatttgtgtttcgcaaatattgacaaaaaagttatgttattatctaaataatcttagcttcatttttatcatcaatatttctgatgtaatgagttatcatgctatt

SEQ ID NO: 15330 - RNA, 144 nt, unidentified
  source 1..144: mol_type = other RNA; note = Related to NZ_FYBR01000008.1; note = Listeria sp.
aagcgtgtggctagattttgtacttgcgcttcgcaagtgttgattaaaagggtggcagtatttgcagcttctgcatccccttctcaaaatgatgtgcggccgttgcatatgattgttcattgcgtaatgagtagccacacgcga

SEQ ID NO: 15331 - RNA, 151 nt, unidentified
  source 1..151: mol_type = other RNA; note = Related to JACVVC010000001.1; note = Enterococcus sp.
tgacatgtggctagattttttggcttgtgattcgcaagtcttgactaaaatggtgggcagatttgctggcttatcaacttaccggttagactctttgtgtaattgtattaaggagtttatgctatttcgcgtaatgagtagccacatgttt

SEQ ID NO: 15332 - RNA, 143 nt, unidentified
  source 1..143: mol_type = other RNA; note = Related to QPVP01000009.1; note = Enterococcus faecium
agacgtgtggctagattttgggcttgtgtttcgcaagcgttgactaaaatggtagggagttttgcttactgtacaatatacccgttgtattatttgcaactgtatggatcttcatgcttcgcataatgagtagccacacgttt

SEQ ID NO: 15333 - RNA, 145 nt, unidentified
  source 1..145: mol_type = other RNA; note = Related to NZ_CP042833.1; note = Enterococcus faecium
aaacgtgtggctagattttgggcttgtgtttcgcaagcattgactaaaatggtaggaagttttgctaacttatcaaattacattatatacattggtatcaacggtattacactctctgcttcgcataatgagtagccacacgttt

SEQ ID NO: 15334 - RNA, 144 nt, unidentified
  source 1..144: mol_type = other RNA; note = Related to NZ_MCRG01000029.1; note = Enterococcus mundtii
agacgtgtggctagattttgtacttgtgtttcgcaagtattgacaaaaatggtaggaagttttgcttattacaaacatcccttagacaagtatggggagcttttaaagtatgcttaaattcgcataatgagtagccacacgtta

SEQ ID NO: 15335 - RNA, 142 nt, unidentified
  source 1..142: mol_type = other RNA; note = Related to JAKNTG010000011.1; note = Enterococcus hirae
agacgtgtggctagattttgtacttgtgtttcgcaagtattgactaaaatggcaggaaattttgctatctctgaaagatgcagcagagaaaataagggatcttatacatgcttgaatacgcataatgagtagccacacgtta

SEQ ID NO: 15336 - RNA, 137 nt, unidentified
  source 1..137: mol_type = other RNA; note = Related to NZ_CP063383.1; note = Listeria monocytogenes
aagcgtgtggctagattgtgtacttgtgtttcgcaagtattgactaaaacggtgggaactttgctcacctctaaacttacctgctaaaagtaatacaggagtaacgtgcgccctgcgtaaggagtagccacacgtat

SEQ ID NO: 15337 - RNA, 151 nt, unidentified
  source 1..151: mol_type = other RNA; note = Related to RKEI01000021.1; note = Clostridiales bacterium
aagcgtgcagcaagattttgtgcttgtgtttcgcaagtgttgacaagaacggtgagaagattcgctctcatgtcacctgtttatccctattaactttttgtgtagcttatagttatatacatatttccgcataatgagttgccgcacgctt

SEQ ID NO: 15338 - RNA, 131 nt, unidentified
  source 1..131: mol_type = other RNA; note = Related to JAFXUW010000045.1; note = Oscillospiraceae bacterium
tggcgtgtggcaagattttttgcttgtgtttcgcaagcattgacaaaaacggtaggttcgtttgccttccattccatggcgtccatgactcgcctgcagctattatcggcataatgagttgccacacgcca

SEQ ID NO: 15339 - RNA, 123 nt, unidentified
  source 1..123: mol_type = other RNA; note = Related to NZ_LIWN01000009.1; note = Campylobacter mucosalis
aagtatgtggctagattttttacttgtgtttcgcaagtattgactaaaatatagcaaaacttttgctactacatctttagcatatattaatagagcatgtgcttaatgagttgccacatacga

SEQ ID NO: 15340 - RNA, 116 nt, unidentified
  source 1..116: mol_type = other RNA; note = Related to RBJN01000156.1; note = Campylobacter sp.
agatgtgtggctagattttgtgtttgtgtttcgcaaacgttgactaaaatgttggcaaactttgctacatgcttacaataatgcaattattttgtataatgagttgccacacattc

SEQ ID NO: 15341 - RNA, 124 nt, unidentified
  source 1..124: mol_type = other RNA; note = Related to NZ_CP060707.1; note = Campylobacter concisus
taaggcgtagctagattttgtacttgtgtttcgcaagtattgactaaaatgttatagaggtttttatctacatcagcatattaatacatagcatcttatgcacttaatgagtggctacgccgat

SEQ ID NO: 15342 - RNA, 143 nt, unidentified
  source 1..143: mol_type = other RNA; note = Related to JAFRHU010000008.1; note = Clostridia bacterium
tgacgtgtggcaagatcttgtacttgtgtttcgcaagtattgactaaaatggtagggctatttgcttatcatcttcattggcattatggccaaacgaccgggattttcccgagacttttcgcataatgagttgccacacgtca

SEQ ID NO: 15343 - RNA, 142 nt, unidentified
  source 1..142: mol_type = other RNA; note = Related to JAFWMS010000015.1; note = Clostridia bacterium
agacgtgtggcaagatcctgtacttgtgtttcgcaagtattgactaaaatggtagggttatttgttctatatctctattattctatatggcaatgctctggtagtctgccgagatcttcgcataatgagttgccacacgtca

SEQ ID NO: 15344 - RNA, 142 nt, unidentified
  source 1..142: mol_type = other RNA; note = Related to JAFZIH010000156.1; note = Clostridia bacterium
tgacgtgtggcaagatcttgtacttgagtttcgcaagtattgactaaaatggtagggcttttgctcttcatctgcgttagcattgtggccattgaaccgggattctcccgagtcattttgcataatgagttgccacacgtca

SEQ ID NO: 15345 - RNA, 129 nt, unidentified
  source 1..129: mol_type = other RNA; note = Related to JAGFBC010000073.1; note = Schleiferilactobacillus harbinensis
ttgcgtatgactagaattttggcttgtgtttcgcaagtcttgacatgaatggtaggttggattggcagttttacacagggttctcccaaaacggtgggcgctttgcgcgtaatgagtagtcatacgcgc

SEQ ID NO: 15346 - RNA, 127 nt, unidentified
  source 1..127: mol_type = other RNA; note = Related to JAHADJ010000026.1; note = Dialister sp.
aagcatgtgacaagattttttacttgtgtttcgcaggtatttatagcaatggtaggagcaatagcgcttccataagtttcactactgagagtctcagattctctgcataatgagttgtcacatgctt

SEQ ID NO: 15347 - RNA, 137 nt, unidentified
  source 1..137: mol_type = other RNA; note = Related to SCPI01000001.1; note = Dialister invisus
aagcatgtggcaagattttgtgcttgtgcttcgcgagcattgcaaataatggttggtgtattggcttgtcttcctggtgaatttttgtttttgtgagttcctcagggattatccgcgtaatgagttgccacatgctt

SEQ ID NO: 15348 - RNA, 129 nt, unidentified
  source 1..129: mol_type = other RNA; note = Related to CP016202.1; note = Eubacterium minutum
atgcgtgcggttggatttttcgcttgtgtttcgcaagtgttgattaaaatgttagggtcaattgcgttttgcttttgatcgacttcttctaaacttttgttgctatgcataatgagcaaccgcacgtac

SEQ ID NO: 15349 - RNA, 138 nt, Staphylococcus sp.
  source 1..138: mol_type = other RNA; note = Related to CP009676.1; note = Staphylococcus schleiferi
ttaagcgtggctagattttgtggttgtgtttcgcaatcgttgaatttattgtaagagtatgttgcttcttatatttttaagtttgtaatattcagaagtttagctttagtattacgcctaatgagtagccacgccttt

SEQ ID NO: 15350 - RNA, 140 nt, Staphylococcus sp.
  source 1..140: mol_type = other RNA; note = Related to CP022056.2; note = Staphylococcus saprophyticus
gtaagcgtggctagattttgtggttgtgtttcgcaaccattgcacttattgcaaggagtgactgcttcttgtaattttcagctcataatattcaggaatttagctttggtatttctcgcctaatgagtagccacgccttt

SEQ ID NO: 15351 - RNA, 144 nt, unidentified
  source 1..144: mol_type = other RNA; note = Related to NZ_JACSMB010000004.1; note = Exiguobacterium sp.
agacgtgtggttagattttttgcttgtgtttcgcaagcattgacataaatggtaggagtattagcgatatatttctccgcttttctctgctgttaacattagcttttcgatgagtttagccgcataaggagtaaccacacgtct

SEQ ID NO: 15352 - RNA, 148 nt, unidentified
  source 1..148: mol_type = other RNA; note = Related to JAFPWD010000023.1; note = Clostridia bacterium
aaacgtgcggcaagattttgtacttgtgtctcgcaagtattgacgaaaacggtaggaggactagcgccttcacattactggtattgcattggattgcattgcattgaggtgcgattcgactgcgcgcggaatgagttgccgcacgttt

SEQ ID NO: 15353 - RNA, 145 nt, unidentified
  source 1..145: mol_type = other RNA; note = Related to JAFVFJ010000126.1; note = Eubacterium sp.
tgatgcatggcaagattttgtactagtgtttcgctagcattgactaacttgtaaggagacatatctgctgtttacaatcttttatcgcaatatatgttttacatacgaatgtaatactttacgcataatgagttgccatgcatcg

SEQ ID NO: 15354 - RNA, 136 nt, unidentified
  source 1..136: mol_type = other RNA; note = Related to CP033618.1; note = Lactiplantibacillus plantarum
atgggtgggactagattattggccgatgattcgtcggtcttgctttgaatggtatgagctttctctaattgttaacactgtactagcctgtaaaaatttccggctgtcgcagtagacaatgagtagtcccatcctt

SEQ ID NO: 15355 - RNA, 137 nt, Streptococcus sp.
  source 1..137: mol_type = other RNA; note = Related to WTXU01000099.1; note = Streptococcus thermophilus
atgggtggggctagattattgaccgatgattcgtcggccttgcatcaaatggtacgagctttctctgactgttaacaaatgtgttagcctgttaacttttccggctgtcgcataagataatgagtagccccatcttt

SEQ ID NO: 15356 - RNA, 138 nt, unidentified
  source 1..138: mol_type = other RNA; note = Related to VHJC01000059.1; note = Lactiplantibacillus plantarum
atgagtggggctagatttttgatcgatgattcgtcgattttgcaaaaaatggtagggactttctatagaaatgttgtctaaatgtatcataggtggacgtttccagctgtcgcttagataatgagtagccccattctt

SEQ ID NO: 15357 - RNA, 153 nt, unidentified
  source 1..153: mol_type = other RNA; note = Related to JXDF01000031.1; note = Apilactobacillus kunkeei
tggtataagatcagattatgtgctcgtgattcgcgagttttgaccaaattggtggggggtgtccccttctactaactttagcttccaaatttacttgtaagcaggtgtacctgtaaactgaggggcgctgtcgaaatgagtgatcttatactt

SEQ ID NO: 15358 - RNA, 159 nt, Streptococcus sp.
  source 1..159: mol_type = other RNA; note = Related to JAJEOY010000010.1; note = Streptococcus sanguinis
atacgtatggctagatttttgacttatgattcgtaagtttttaactaagggtagctagattttgcctttcttatcgataaacagaagagaatttttaaattattcaacactgttttatgcagattcgactgcgtcggcatagtgagttgccatacgttt

SEQ ID NO: 15359 - RNA, 153 nt, Streptococcus sp.
  source 1..153: mol_type = other RNA; note = Related to NZ_CZFC01000010.1; note = Streptococcus suis
atacgtatgattagattttgacttatgtttcgtaagtttttatgttaagggtaggagtttttgcctttctattgcttagccgaaaaagtagtcagtttagaatctgctgaaggttaagcagaccgcgtcggcgtaatgagttatcatacgttt

SEQ ID NO: 15360 - RNA, 194 nt, Streptococcus sp.
  source 1..194: mol_type = other RNA; note = Related to NZ_AP024276.1; note = Streptococcus parasuis
gtgcgtatgattagatttttgacttgtgtgttcgcaagaattaacaaaaaggttacacggtgtttagctcactcaagtgccccttcagagaaacgaaagtcaatccattagtggaataaatgtttatagtagtttttaggctattttcggaattattttcatactttcgttcgcgtaagagttttcatacgctt

SEQ ID NO: 15361 - RNA, 193 nt, Streptococcus sp.
  source 1..193: mol_type = other RNA; note = Related to NZ_KB904582.1; note = Streptococcus ovis
ttgcgtatgattagatttttgacttgtgtgttcgcaagtattaacttcaatgttagaagagtgttcagctcactccagtatttccgcttaaggaaatagaatttcagcacctgagaaaattgttttaatagtatctttagctatttcggaattattctagtactgtcgttcgcataggagtaatcatacgctt

SEQ ID NO: 15362 - RNA, 195 nt, Streptococcus sp.
  source 1..195: mol_type = other RNA; note = Related to NZ_AQYA01000033.1; note = Streptococcus henryi
acgcgtatgattagatttttgacttgtgtgttcgcaagtattagcgataatgggtatggtagtgtttagctcactccagtatatctacttagagaaatcgaatgtcagctactaagaaaactgtattagtagaagccgtaaactatttcggaagtatttctttactgtcgttcgcataagagttttcatacgctt

SEQ ID NO: 15363 - RNA, 193 nt, Streptococcus sp.
  source 1..193: mol_type = other RNA; note = Related to RQZA01000003.1; note = Streptococcus minor
atgcgtatgattagatttttgacttgtgtgttcgcaagtattaacttcaatgttagaagagtgttcagctcactccagtatttccgcttaaggaaatagaatttcagcacctgagaaaattgttttaatagtatctataactatttcggaattattcttttactgtcgttcgcataggagtaatcatgcgctt

SEQ ID NO: 15364 - RNA, 167 nt, Streptococcus sp.
  source 1..167: mol_type = other RNA; note = Related to NZ_CP075172.1; note = Streptococcus equinus
atgcgtatgattagatttttgacttgtgtgttcgcaagtattaataacaatgttaggagagcgtttagcgcactttagtacattcttttgaaaacgtatcagtaggataaaaaatcgtggtggttaagagtattactgtcgttttgcgtaagagttttcatacgctt

SEQ ID NO: 15365 - RNA, 194 nt, Streptococcus sp.
  source 1..194: mol_type = other RNA; note = Related to AP010655.1; note = Streptococcus mutans
atgcgtatgattagatttttgacttgtgtgttcgcaagtattaacgacaatgttacgggagcgtttagttcgctccagtatacctttcaaaaaccatagtatacaatcagctgagaaaactttcttagcaatgtctgttgcccggttaggaatgatccatttactgtcgttcacgtaggagttttcatacgctt

SEQ ID NO: 15366 - RNA, 198 nt, Streptococcus sp.
  source 1..198: mol_type = other RNA; note = Related to CABHMZ010000033.1; note = Streptococcus constellatus
ttgcgtatgattagatttttgacttgtgtgttcgcaagtattaacgacaatgttataagagtgtctagctcactccagcattcccgcttaagaggaaggatagggatgactgctgctggaaaaaattcttagtgttatttattttaccattcggaattattctattgctgtcgttcgcctaagagttatcatacgctt

SEQ ID NO: 15367 - RNA, 190 nt, Streptococcus sp.
  source 1..190: mol_type = other RNA; note = Related to NCUE01000019.1; note = Streptococcus oralis
ttgcgcatgattagatttttgacttgtgtgttcgcaagtattaacaaaaatgttactagagtgttcagctcactccagtaatcccaaaactaagacaattaagtttcttctggaaaaagttgcagtatgttttatctctgctgaaggaagatttctatactgtcgttcgcataagagttttcatgcgctt

SEQ ID NO: 15368 - RNA, 190 nt, Streptococcus sp.
  source 1..190: mol_type = other RNA; note = Related to JYGT01000002.1; note = Streptococcus infantis
ttgcgcatgatcagatttttgacttgtgtgttcgcaagtattaacaaaaatgttaccagagtgttcagctcactccagtaatcccaaaactaaggcaaataggcttcttctggaaaaagttgcagtatgttttatctctgctaaaggaagatttctatactgtcgttcgcataagagttttcatgcgctt

SEQ ID NO: 15369 - RNA, 148 nt, Streptococcus sp.
  source 1..148: mol_type = other RNA; note = Related to NTGM02000001.1
ttgcgtatgattagatttttgacttgtgtgttcgcaagtattaacaacaatgttataggagtgtttggcttcatctggtgttattagcttcaggattcattaggatttctactggcaatcttgttcgcgtaagagttatcatacgctt

SEQ ID NO: 15370 - RNA, 190 nt, Streptococcus sp.
  source 1..190: mol_type = other RNA; note = Related to NZ_CP066059.1; note = Streptococcus oralis
ttgcgtatgattagatttttgacttgtgtgttcgcaagtattaacaaaaatgttactagagtgttcagctcactccagtaatcccaaaactaaggcaattagatttcttctggaaaaagttgcagtatgttttatctctgctgaaggaaggtttctatactgtcgttcgcataagagttttcatgcgctt

SEQ ID NO: 15371 - RNA, 193 nt, Streptococcus sp.
  source 1..193: mol_type = other RNA; note = Related to NZ_LR134002.1; note = Streptococcus sanguinis
tagcgcatgattagatttttgacttgtgtgttcgcaagtattaagagcaatgttactagagtgttcagctcactccagtaatttccgacaatagtgacagttagattttttcgagaattattcccaactttcatcaattgaagtcttaggaagatttctatactgtcgttcgcataagagttttcatgcgctt

SEQ ID NO: 15372 - RNA, 193 nt, Streptococcus sp.
  source 1..193: mol_type = other RNA; note = Related to CDMW01000001.1; note = Streptococcus sanguinis
tagcgcatgattagatttttgacttgtgtgttcgcaagtattaagaacaatgttactagagtgttcagctcactccagtcatttccgacaatagtgacagttagattttttcgagaattattccaaactttcatcaattgaagtcttaggaagatttctatactgtcgttcgcataagagttttcatgcgctt

SEQ ID NO: 15373 - RNA, 183 nt, Streptococcus sp.
  source 1..183: mol_type = other RNA; note = Related to NZ_OU540596.1; note = Streptococcus salivarius
aagcgtatgattagatttttgacttgtgattcgcaagtaataatgaaaatgtgttgaaggtgtttagctcctccagtatatttcctattaagaaaaaatgaaaaagttcaggtgacttaaatgacatcagctgaaaagttggtatctgtatactgtcgtccgcgtaagagttttcatacgctt

SEQ ID NO: 15374 - RNA, 202 nt, Streptococcus sp.
  source 1..202: mol_type = other RNA; note = Related to NZ_RCVM01000028.1; note = Streptococcus hillyeri
ctgcgtatgattagatttttgacttgtgtgatcgcaagtattaacattaatgttagctgaaagttagctcactccagtatattctttgagagaattaaagttatctgctgagtgaaaatcgaagtgaaatgactggttaaggaaagctaagtaatttggtaatattctatactgtcgttcgcgtaagagttatcatacgctt

SEQ ID NO: 15375 - RNA, 195 nt, Streptococcus agalactiae
  source 1..195: mol_type = other RNA; note = Related to LR134265.1
atgcgtgtgaatagatttttgacttgtgtgttcgcaagtattaacaataatgttacaagagcgttttgctccctccagtagtcaataatgttcaattcgacaattgctgctgatgaatgataaactacatcaataggctgaactaattggctatatctgttttactgtcgttcgcttgagagttttcacacgctt

SEQ ID NO: 15376 - RNA, 164 nt, Streptococcus sp.
  source 1..164: mol_type = other RNA; note = Related to NZ_BCLE01000009.1; note = Streptococcus orisasini
atgcgtgtgactagatttttgacttgtgtgttcgcaagtattaacaacaaaggttggaatactttttcagcctctaatatctcaccaggaagactttcagctgagaaaacatctgtacttcccttaggccaactgcttttcgcataatgagttgtcacacgctt

SEQ ID NO: 15377 - RNA, 143 nt, unidentified
  source 1..143: mol_type = other RNA; note = Related to QSGD01000014.1; note = Holdemanella biformis
tagcacatgattagatatttggcttgtgtttcgcaagctttgaaaaaaatggtagcaaggttagcgattattctttacgcttaattactccttatttacttttattgtctttatttcaacgcataatgagtagtcatgtgctt

SEQ ID NO: 15378 - RNA, 132 nt, Streptococcus sp.
  source 1..132: mol_type = other RNA; note = Related to RJOU01000001.1; note = Streptococcus gordonii
gtgtgcatggctagatttttaacttgtgattcgcaagtaattaaagtaatgttatatgagtcttttagcatatagtatagctagacttaggtcagacatactaagcaacgcataatgagttgccatgcactt

SEQ ID NO: 15379 - RNA, 135 nt, unidentified
  source 1..135: mol_type = other RNA; note = Related to NZ_SCWC02000010.1; note = Macrococcus equipercicus
tatcatgtggctagatttttggtatgtgcttcgcataccttgaaaagaaaggcagggacatttgttacctgtacgcatcatcatctagtgggatagttggcaattggtataaacataatgagtagccacatgact

SEQ ID NO: 15380 - RNA, 143 nt, unidentified
  source 1..143: mol_type = other RNA; note = Related to JAHAAI010000002.1; note = Veillonella sp.
tagcgtatggttagattttttgcttgtgcttcacaagtattgatttatttatgaaggatgggagttttttctctctctgataaattctttagtaaatacattgggaatatcatgtgtttgagataaagagtaaccatacgctg

SEQ ID NO: 15381 - RNA, 156 nt, unidentified
  source 1..156: mol_type = other RNA; note = Related to JAHAFZ010000010.1; note = Veillonella parvula
tagcgtatggttagattttttacttgtgcttcacaagtgttgatataaatgttaggactcttatgtctctagagataatcttttatagatacagatgaattctttagtttaatacttttgtatttagacttttatataaagagtaaccatacgctt

SEQ ID NO: 15382 - RNA, 137 nt, unidentified
  source 1..137: mol_type = other RNA; note = Related to AWXD01000007.1; note = Peptoniphilus sp.
tagcgtgtggttagagtttttgcttgtgtttcgcaagcgttgatttaaatgtgaggtctgtttgtctcgctcgtcaattcctttttatttatatatgatttttgtatgaatttgacataaagagtaaccacacgctt

SEQ ID NO: 15383 - RNA, 135 nt, unidentified
  source 1..135: mol_type = other RNA; note = Related to NZ_ADFU01000011.1; note = Veillonella parvula
tagcgtatggttagagtttttgcttgtggttcgcaagcgttgaatttaatgtgagagttgctttcagctctcgatgattctttaataatttcatgtacacatgatgaatttgagataaagagtaaccatacgctt

SEQ ID NO: 15384 - RNA, 132 nt, unidentified
  source 1..132: mol_type = other RNA; note = Related to LTGD01000005.1; note = Anaerosphaera sp.
tagcgtatggttagattttttgcatgtgattcacatgcgttgtatttaatgttaggagcattagtcactaacaaacccattcataataatataagttatacttagatcgacctaaggagtaaccatatgctt

SEQ ID NO: 15385 - RNA, 136 nt, unidentified
  source 1..136: mol_type = other RNA; note = Related to NZ_ADFR01000009.1; note = Bulleidia extructa
gggcgtatggttagattttttacttgtgtttcacaagtgttgatttcaatgtgagatagataggtctttcaataaacctttgaaatgtatactgtaagttcagtatgctaataacctaatgagtaaccatacgtct

SEQ ID NO: 15386 - RNA, 151 nt, unidentified
  source 1..151: mol_type = other RNA; note = Related to JAEUGG010000004.1; note = Peptostreptococcus stomatis
ttgcgtatagctagatcttttacttgtgtttcgcaagtgttgcatttaatggttgatagattagccacacttaaactttttttccttctttcatttttttctttttttcctgaaaagatgaatgactggcataatgagtagctatacgctt

SEQ ID NO: 15387 - RNA, 151 nt, unidentified
  source 1..151: mol_type = other RNA; note = Related to JABZQL010000055.1; note = Mogibacterium diversum
aagcgtatagctagattttttacttgtggttcgcaagtagttttgtaaatggaacggggtttagcgatatccttgattcaaattttatcattaaagaaaaaatagtatgattgcatcaatgcttaattgcataatgagtagctatacgcat

SEQ ID NO: 15388 - RNA, 130 nt, unidentified
  source 1..130: mol_type = other RNA; note = Related to MNSF01000070.1; note = Coprococcus sp.
aggcgcatcgttagatttttgagttgtgtttcgcaattcttggtgaaaacggtagggagacttgccacccaataaaggatatatgcctgttttacccttattatagggcataatgagtagcgatgcgcct

SEQ ID NO: 15389 - RNA, 144 nt, unidentified
  source 1..144: mol_type = other RNA; note = Related to FMEJ01000011.1; note = Clostridium sp.
ttgtgcacggttagattttttactcatgtttcgtgagtattgacaagaacggtacgatatgtgctctttacgcgtctcccgaacactcacgctatacttttgggagattacgggttacactgcctaaagagtaaccgtgcacaa

SEQ ID NO: 15390 - RNA, 143 nt, Streptococcus sp.
  source 1..143: mol_type = other RNA; note = Related to FIHB01000001.1; note = Streptococcus suis
cgacatataactagaatttattgtttgtgtatccgcaaatagtgataaaattagctgggtaactagtcttgtttcttgcaactgaaaagtaacttatacttacaaaggctcgcaagactcgcatattgagtagttatatgtct

SEQ ID NO: 15391 - RNA, 143 nt, Streptococcus sp.
  source 1..143: mol_type = other RNA; note = Related to NZ_UHFV01000002.1; note = Streptococcus macacae
taacgtataactagaatttattgtttgtgtatccgtaaacaatgataaagtgaactgggcggctagtttgatttattgcaccggctgagaaatcgcttttatcaacgctcgacaagtctcgcataatgagtagttatatgttt

SEQ ID NO: 15392 - RNA, 141 nt, Streptococcus sp.
  source 1..141: mol_type = other RNA; note = Related to NZ_GL878548.1; note = Streptococcus sanguinis
tgacatataactagaatttattgtttgtgtatccgcaaattgtgatgaagtcaactgggtaactagtttaagatttcgcctgttgagaagcttgttcagaaaatgctcaacaagtctcgcatagtgagtagttatatgttt

SEQ ID NO: 15393 - RNA, 142 nt, unidentified
  source 1..142: mol_type = other RNA; note = Related to JAGZSC010000015.1; note = Clostridiaceae bacterium
ttgcgtgtggttggattatttggcttgtgtttcgcaagttttgacaaaaatggtgggaatgtacaccactctctatgttcagactggaggggcttcttaatatagtagttctcgaatggtgttaatgagcaaccacacgcct

SEQ ID NO: 15394 - RNA, 152 nt, unidentified
  source 1..152: mol_type = other RNA; note = Related to JAFUUI010000025.1; note = Ruminococcus sp.
gagcgtatgacaagattgttgtgctgtgcttcgcagtatcttgatgctatgtcagggcatccacgctttcgggcgtctctacagtacctataacaatttctgtattatttattgttatataccttttccgcctaatgagttgtcatgcgctc

SEQ ID NO: 15395 - RNA, 134 nt, unidentified
  source 1..134: mol_type = other RNA; note = Related to NZ_WQRC01000021.1; note = Anaerostipes hadrus
caacgtgtagttagattttgtgcttgtgtttcgcaagtattggcaaaaatggtaggaacatatgcgttcttttactatttaattagtcttggttagatgaacttagacaccgcataatgagtaactacacgtta

SEQ ID NO: 15396 - RNA, 139 nt, unidentified
  source 1..139: mol_type = other RNA; note = Related to JAGZGD010000017.1; note = Lachnospiraceae bacterium
caacgtgtagttagattttgtacttgtgtttcgcaagtgttggtaaaaatggtagggagatatgcgttctcttacttttttaactatgatgtattgcagagtagtctttaagcatcgcataatgagtaactacacgtta

SEQ ID NO: 15397 - RNA, 133 nt, unidentified
  source 1..133: mol_type = other RNA; note = Related to NZ_AUJA01000011.1; note = Butyrivibrio fibrisolvens
aagcgtgtgattagaattttggcttgtgaatcgcaagttttattattaatgttaggatcgcgtgctatttttatcgcatagttagtacatcttttgttaatatataatctgcataaggagtaatcacacgcat

SEQ ID NO: 15398 - RNA, 130 nt, unidentified
  source 1..130: mol_type = other RNA; note = Related to KE159810.1; note = Lachnospiraceae bacterium 10-1
atgcgtgtggctagatttttggcctgtgtatcgcaggctttgatgaaaatgtcagggacatctgcgccccggtatataatactctgttaacctgtatcttataatcggcaaaaggagtagccacacgcat

SEQ ID NO: 15399 - RNA, 159 nt, unidentified
  source 1..159: mol_type = other RNA; note = Related to JRFX01000003.1; note = Lactococcus lactis
tagcacacaactagactctttgatatgtgtttcgcatatcttgacaacaatggtggaagtttcagcatatacactacatcagtctattcaaagtattcatcggcactgtaagcaaatgtgccacgatgtcgctattcgcataatggtggttgtgtgcgt

SEQ ID NO: 15400 - RNA, 135 nt, unidentified
  source 1..135: mol_type = other RNA; note = Related to NZ_JADPDD010000032.1; note = Lactococcus lactis
tagcatacaactagaccctttgatttgtgtttcgcaaatctgtaaacaaatggtggaaacatcagcatttttatgagtataattgccgttaaggtgtgggcaattgtcgctgcgcatattggtggttgtatgcgt

SEQ ID NO: 15401 - RNA, 143 nt, unidentified
  source 1..143: mol_type = other RNA; note = Related to BJJW01000002.1; note = Leuconostoc citreum
atagtcaaggttggatttttgccctttgaatcgaggggctttacaaaaatggtgggaacattcattgcggtaattttgccaacagggtaacattgctgagctttcacacgttctgtggctgaacaatgagctgccttggcttt

SEQ ID NO: 15402 - RNA, 138 nt, unidentified
  source 1..138: mol_type = other RNA; note = Related to FN822744.1; note = Leuconostoc gelidum
atagtcaaggttggattttcaccctttgaatcgaggggttttacaacaatggtagtaacattcattacgggttcattgccgaagggtaatgttgccgatgttgtttacactttgtgaacaatgagctgccttggcttt

SEQ ID NO: 15403 - RNA, 158 nt, unidentified
  source 1..158: mol_type = other RNA; note = Related to LFQN01000005.1; note = Exiguobacterium acetylicum
atatgtgtggtcagattttttacttgtgtttcgcaagtattgaaaaaaatggtagggagaatagctcgtatatatcccgatttttctcttagttttctcctggttttcccttttatctacgtgtgactcagcggcgcctaaagagtgaccacacataa

SEQ ID NO: 15404 - RNA, 132 nt, unidentified
  source 1..132: mol_type = other RNA; note = Related to DPHU01000079.1; note = Eubacterium sp.
taatgtgtggttagattttgggcctgcgtatcgaaggcattgattaaaatggtgggaacactcgcgatttattatattttttatatctctttatggagacttagttttagcataatgagtaaccacacattt

SEQ ID NO: 15405 - RNA, 134 nt, Streptococcus agalactiae
  source 1..134: mol_type = other RNA; note = Related to LBLH01000065.1
aagcgtatgaacagattttatggcttagcgattcgtaagcctttaactacctagttaggtcctgtagcatagtccatgttggccgtattgatgactttcatgttgccttttgcttaatgagttttcatacgctt

SEQ ID NO: 15406 - RNA, 125 nt, Streptococcus sp.
  source 1..125: mol_type = other RNA; note = Related to NZ_JALDUR010000001.1; note = Streptococcus parasanguinis
atgcgtatgaatagattttatggcttagcggttcgtaagcctttctctcattagtggggggatttagcaagtatctgtatacttgacttgttcgtagcgattgcgtaatgagttttcatacgctt

SEQ ID NO: 15407 - RNA, 132 nt, Streptococcus sp.
  source 1..132: mol_type = other RNA; note = Related to UHFT01000001.1
atgcgtatgaacagattctatggcttagcgtttcgtaagcctttctccctctagcagggagctatagcaagttactttagctgcctagttgacttgtctgttgccttttgcgtaatgagttttcatacgctt

SEQ ID NO: 15408 - RNA, 146 nt, unidentified
  source 1..146: mol_type = other RNA; note = Related to JAGEKB010000001.1; note = Lachnoanaerobaculum sp.
aggcgtatgaaaagattttgtggcttagcgtttcgtaagcctttataataatgttaggaataattatcgtagtccatattatgttttgtttttttggaattctaactgatatacatggttgtaacataatgagttttcatacgcct

SEQ ID NO: 15409 - RNA, 146 nt, unidentified
  source 1..146: mol_type = other RNA; note = Related to JABZPB010000073.1; note = Lachnoanaerobaculum sp.
aagcgtatgaaaagattttttggcttagcgtatcgtaagcctttgtaaccatgttagaggtcatggtcgtattctatataatatattgttttttatgtatcctaaagcatagctaccaatataacataaggagttttcatacgctt

SEQ ID NO: 15410 - RNA, 134 nt, Streptococcus sp.
  source 1..134: mol_type = other RNA; note = Related to VKGS01000001.1; note = Streptococcus cristatus
ctacgtatgacaagatttttgacttagcgcttcgtaagtctttctatcaacggtaggagcgttgctttatactgtctttgtcagtatctgttggcatgtttattgctatacgcgtaatgagttgtcatacgttt

SEQ ID NO: 15411 - RNA, 146 nt, unidentified
  source 1..146: mol_type = other RNA; note = Related to NZ_KV790849.1; note = Granulicatella sp.
atgcgtatgaaaagattttatggcttagcgtttcgtaagccttcaaaacattagtgggagatgctagcgcaagtactacttcatccaccttatgaacagctaatttgctgtcactgttgctttgcataatgagttttcatacgctt

SEQ ID NO: 15412 - RNA, 134 nt, Staphylococcus aureus
  source 1..134: mol_type = other RNA; note = Related to NZ_UHCA01000002.1
tgtcgtgtggttagattttttgcacgagtttctcgtgtgttgacaaaaatgttgataacattagttttgtttcataattttccgataatcttttgcgtttatagtttttgaacataatgagtaaccacacgatg

SEQ ID NO: 15413 - RNA, 127 nt, unidentified
  source 1..127: mol_type = other RNA; note = Related to JAIMFU010000001.1; note = Salinicoccus roseus
aatcgtgtggttagagatttcacatgatgtttctcatgtgttgattgtaatggtagagaaattactcgccgtttaaacactcgtatactgctcgtatataaaatgcacaatgagtaaccacacgatt

SEQ ID NO: 15414 - RNA, 133 nt, Staphylococcus sp.
  source 1..133: mol_type = other RNA; note = Related to NZ_VELK01000002.1; note = Staphylococcus hominis
aaatgcatggctagattttttacttgtgtttcgcaagtatttataaaattgttggcggatttgcatattgtcaactatttacattttcttaatttgtgttgtacttaatagcctaatgagtagccatgcataa

SEQ ID NO: 15415 - RNA, 131 nt, Staphylococcus sp.
  source 1..131: mol_type = other RNA; note = Related to NZ_CP023497.1; note = Staphylococcus simulans
tagcgcatggctagaatttttgcttgtgtttcgcaagcatttatcgaattgctggcgatatttgcttttagtcagctttacattttcgttctacatttccactaaacagcctaatgagtagccatgcgtat

SEQ ID NO: 15416 - RNA, 131 nt, unidentified
  source 1..131: mol_type = other RNA; note = Related to JALGOX010000003.1; note = Mammaliicoccus sciuri
aagcgcatggctagaatttttacttgtgtttcgcaagtgtttataggattgttagtaggtttgcatatatgtaaattttctcgttagaattttgcttcgacgtttacagccaaatgagtagccatgcgtat

SEQ ID NO: 15417 - RNA, 128 nt, Staphylococcus sp.
  source 1..128: mol_type = other RNA; note = Related to CP068216.1; note = Staphylococcus pasteuri
atgcgtatggctagaatgtttacttgtgtttcgcaagtatttatatgaaagtccatggattttcattgttttaattttcttttctatttttgcacttaatttctagactaatgagtagccatacgtat

SEQ ID NO: 15418 - RNA, 132 nt, Staphylococcus sp.
  source 1..132: mol_type = other RNA; note = Related to PZEX01000047.1; note = Staphylococcus warneri
ttatgcatggctagaaattttgcttgtgtttcgcaagcatttatataattgttagggagatttgcatattgctaacttttcatttattttcagaattttatattcaattgccaaatgagtagccatgcattc

SEQ ID NO: 15419 - RNA, 131 nt, unidentified
  source 1..131: mol_type = other RNA; note = Related to NZ_MJBI02000011.1; note = Macrococcus goetzii
atgcgtatggctagaatttttacttgtgcttcgcaagtgtttataaaattgtatgtgagatagcttcttatcaattgtccattcgattatgaattatccttttataatgcctaatgagtagccatacgcat

SEQ ID NO: 15420 - RNA, 179 nt, unidentified
  source 1..179: mol_type = other RNA; note = Related to NZ_JQBL01000009.1; note = Kandleria vitulina
atgcgcatgattagatcttttgactcatgaatcgtgagtcttggcggaaagggtactcgacgactgtttaaataatttttaatattatgctttatagcacgccctttcagaatatatttataagcactttttagaatattcacgtgttttgttgttttataatgagttatcatgcgctt

SEQ ID NO: 15421 - RNA, 142 nt, Acinetobacter sp.
  source 1..142: mol_type = other RNA; note = Related to CP077398.1; note = Acinetobacter nosocomialis
tgtcctttgggaagatttttagattgcgtatcgcattctgttttgaaaatgtcagtggcttattgtcaaatttgccaaccaattattgggcaccctgctaaccatgctgttgtgcgttgaccatatgagttcccaaggggca

SEQ ID NO: 15422 - RNA, 142 nt, Acinetobacter sp.
  source 1..142: mol_type = other RNA; note = Related to CP059039.1; note = Acinetobacter baumannii
tgccctttgggaagatttttagattgcgtatcgcattctgttttgaaaatgttaatggcttattgtcaaattagccaaccagtcattgggcactctgctaaccatgctgctgtgcgttgaccatatgagttcccaaggggca

SEQ ID NO: 15423 - RNA, 141 nt, Acinetobacter sp.
  source 1..141: mol_type = other RNA; note = Related to KB850198.1; note = Acinetobacter colistiniresistens
tgccccttgggaagatttttagattgcgtatcgcaatctgttttgaaaatgttaatggcttattgtcaaatttgccggtatgtattggttacgccgctaagtatactcttgtgcgatgaccatatgagttcccaaggggta

SEQ ID NO: 15424 - RNA, 141 nt, Acinetobacter sp.
  source 1..141: mol_type = other RNA; note = Related to JAKZGD010000010.1
cgctccttgggaagatttttagattgcgtatcgcaatctgttttgaaaatgttaatggcttattgtcaaatttgccgatatgtattggttacgccgctaagtatactcttgtgcgatgaccatatgagttcccaaggggta

SEQ ID NO: 15425 - RNA, 142 nt, Acinetobacter sp.
  source 1..142: mol_type = other RNA; note = Related to NZ_CP039031.1; note = Acinetobacter indicus
tgccctttgggaagatttttagattgcgtatcgcagtctgttttgaaaatgtgaacggcttatgtctgaactcttgccgacgctacacttgtgctgtgcggttttttccccgtactgtgaccatatgagttcccaaggggca

SEQ ID NO: 15426 - RNA, 144 nt, Acinetobacter sp.
  source 1..144: mol_type = other RNA; note = Related to NZ_CP054822.1; note = Acinetobacter lwoffii
cgccctttgggaagatttttagattgcgtatcgcagtctgttttgaaaatgtgagaggcgtattgtccaatgcttgccgatactatactttgtgctgaacagttggctctgctgtactgtgaccatatgagttcccaaggggca

SEQ ID NO: 15427 - RNA, 143 nt, Acinetobacter sp.
  source 1..143: mol_type = other RNA; note = Related to NEGA01000008.1
agccctttgggaagatttttagattgcgtatcgcagtctgttttgaaaatgtgaaaggcgtattgtcaaatttgccaatgttatgttgtgtgctgttactggtagtgccgctgtgctgtgaccatatgagttcccaaggggca

SEQ ID NO: 15428 - RNA, 141 nt, Acinetobacter sp.
  source 1..141: mol_type = other RNA; note = Related to SGSS01000016.1
tacctcttgggaagatttttagattgcgtatcgcagtctgttttgaaaatgttaatggcttattgtcaaatttgccaaccagttttgggcactctgctaaccatgctgatgtgcgttgaccatatgagttcccaaggggta

SEQ ID NO: 15429 - RNA, 136 nt, Acinetobacter sp.
  source 1..136: mol_type = other RNA; note = Related to JAGJSX010000002.1; note = Acinetobacter nosocomialis
atatcggtgattagaaattgagttgtgtatcacaacttgctgactaatgttagcagaactgcttaactacgtacgaccttttaatggttgaactttgataaataactggtgtcgccatttgagttttcaccgatat

SEQ ID NO: 15430 - RNA, 132 nt, Acinetobacter sp.
  source 1..132: mol_type = other RNA; note = Related to NZ_VOZD01000001.1
atatcggtgattagaaattgagttgtgtatcacaacttgctgactaatgttagcagaactgcttaactacgtacgaccttaatggttgaactttgataaaactggtgtcgccatttgagttttcaccgatat

SEQ ID NO: 15431 - RNA, 177 nt, Acinetobacter sp.
  source 1..177: mol_type = other RNA; note = Related to NZ_FMYO01000016.1; note = Acinetobacter kookii
ctatctgtgaatagattcatggattgtgtttcgcaatctgatttctaagggtcaggacatgagctaacttatgtcttcctgaaatttctttcgtataagaaggattttaataattccttgaggctttctctcttttgagaatgcttgatggttcgccataagagttttcacagatag

SEQ ID NO: 15432 - RNA, 181 nt, Acinetobacter sp.
  source 1..181: mol_type = other RNA; note = Related to NZ_CP032279.1
ctatctgtgaatagattcatggattgtgtttcgcaatctgatttctaagggtcaggtaatgagctaaaatttattatcttcttagattttttcttaatagaaattttttatacttatttgaggctttcttcttttcttggagattgcttaggttatacgccataagagttttcacagatag

SEQ ID NO: 15433 - RNA, 143 nt, unidentified
  source 1..143: mol_type = other RNA; note = Related to NZ_CAJHAW010000011.1; note = Psychrobacter salsus
tcccttctgggaagattattgggatgcgtatcgcaacctgttctgaaaatgtaagagtttctgtctgattcctgtaaggattctgatagttctaatggtgtctatagtatctgtactgtgaccacatgagttcccagaaggaa

SEQ ID NO: 15434 - RNA, 144 nt, unidentified
  source 1..144: mol_type = other RNA; note = Related to NZ_CAJGZW010000014.1; note = Psychrobacter immobilis
tgccctctgggaagattattagattgcgtatcgcaatctgttttgagaatgtaaggtcttatgtctgattacgcctacggtaatctgatactgctataggtatctaaaatattgtacggtgaccatatgagttcccagagggtt

SEQ ID NO: 15435 - RNA, 139 nt, Acinetobacter sp.
  source 1..139: mol_type = other RNA; note = Related to AAYLMD010000006.1; note = Acinetobacter baumannii
tgtcctttgagaagatatttggatagcgaatcgctatctattttattaagattggaatccaatctgtcgaaatctcttgaagtgagctataatttcttaaagttatgctctgataagaccagtgagttctcaaaggaca

SEQ ID NO: 15436 - RNA, 140 nt, Acinetobacter sp.
  source 1..140: mol_type = other RNA; note = Related to JEWN01000001.1; note = Acinetobacter baumannii
tgtcctttggaaagatctttaaatagcgtatcgctatttgttttgaaattgggcttaggctcttcttttgtccagcaatactttgcggtcagtgcttagtcactctgcacggttgttgaccattgagtttccaaaggaca

SEQ ID NO: 15437 - RNA, 123 nt, Acinetobacter sp.
  source 1..123: mol_type = other RNA; note = Related to NZ_VTRF01000001.1; note = Acinetobacter baumannii
gcacctatggaaagatttatgattgtgattcgcaattatgtatctaatgttaaggcactatgacaagttaccttaagataacctttaaaacgtactagaagtccatgaagtttccataggtgc

SEQ ID NO: 15438 - RNA, 124 nt, Acinetobacter sp.
  source 1..124: mol_type = other RNA; note = Related to NZ_BKVP01000163.1; note = Acinetobacter ursingii
gcacctatggaaagatttatgattgtgattcgcaatcatgtatctgatgttaagacacaatagttgtaacgttagagtataacctataagacgtactagaagtccatgaagtttccataggtgt

SEQ ID NO: 15439 - RNA, 124 nt, Acinetobacter sp.
  source 1..124: mol_type = other RNA; note = Related to JADVON010000009.1; note = Acinetobacter bereziniae
gcacctatggaaagatttatgattgtgattcgcaattatgtatctaatgttaaggcacaatgtagagtaaccttggcataacctttaaaacgtactggtaagtccatgaagtttccataggtgc

SEQ ID NO: 15440 - RNA, 124 nt, Acinetobacter sp.
  source 1..124: mol_type = other RNA; note = Related to SJOH01000014.1
gcacctatggaaagatttatgattgtgattcgcaatcatgtatctaatgttaagacacaatgtaatgtaaacttagtataacctttagaacgtactaggtagtccatgaagtttccataggtgc

SEQ ID NO: 15441 - RNA, 122 nt, Acinetobacter sp.
  source 1..122: mol_type = other RNA; note = Related to SJOG01000001.1
gcacctatggaaagatttatgattgtgattcgcaatcatgtatttaatgttaaggcactttgacgatagccctaatataatcggtgaaacgtactggtagtccataaagtttccataggtgc

SEQ ID NO: 15442 - RNA, 153 nt, unidentified
  source 1..153: mol_type = other RNA; note = Related to NZ_LN776178.1; note = Necropsobacter sp.
gtgggtataagcagattttttgctttgtttcggagcaagtattgataatattggcgtaattgttaataattattgtaccatctaataaatttagattttaaactattttaatagcttagctagctaacatcacataagagtgcttgtacccac

SEQ ID NO: 15443 - RNA, 159 nt, Pasteurella sp.
  source 1..159: mol_type = other RNA; note = Related to PPWW01000004.1; note = Pasteurella multocida
gtgaatataagcagaacattttactttgtttcggagtaagaattaatcatgtagcaatcagttttattgcttacattatctattaacttaatgtagttattacaaataaaacattaagtagcatcctcagaggaatcgcataagagtgcttatattcac

SEQ ID NO: 15444 - RNA, 151 nt, unidentified
  source 1..151: mol_type = other RNA; note = Related to NZ_CP031477.1; note = Haemophilus parainfluenzae
gtggatataagcagattttttgctttgtttcggagcaagtattaataatattggtgttgctaccactgttatctcatattttaaccactaagaaatgtagtagatttatatctagatagcatggctataacgtaagagtgcttatattcac

SEQ ID NO: 15445 - RNA, 136 nt, unidentified
  source 1..136: mol_type = other RNA; note = Related to NZ_CP072548.1; note = Aggregatibacter sp.
gtgggtgtgaatagaatttttgctttgtttcgaagtaactattaacaaagtccggtggattttgtatatttaactgcataattatcatgatattagtagcttaatatataagtcactaatgagttttcacacccac

SEQ ID NO: 15446 - RNA, 131 nt, unidentified
  source 1..131: mol_type = other RNA; note = Related to MLHL01000009.1; note = Rodentibacter trehalosifermentans
gtgggtatagatagatttttcacttttgtttctgaagtggttacataaaatgtcaagagttgatgtatataattatcgtagtattttaatacttcgattacttagcattactaatgagtatctatacccac

SEQ ID NO: 15447 - RNA, 130 nt, unidentified
  source 1..130: mol_type = other RNA; note = Related to VSFH01000001.1; note = Lonepinella koalarum
gtaggtataaatagatttttcacttttgtttctgaagtggtttcaaaaaatatcaagacttgatgtgatgattatcttagtagataaaatactaagaggatttagcatactaatgagtatttatacctac

SEQ ID NO: 15448 - RNA, 130 nt, unidentified
  source 1..130: mol_type = other RNA; note = Related to NZ_JTLX01000008.1; note = Haemophilus haemolyticus
gcaggtataaatagatttttcacttttgtttcaggagtggttttaaataatgtcaggaattgatgctgataatattgtaagtactaagaagtttagtagattaaacttgccaatgagtatttatacctgc

SEQ ID NO: 15449 - RNA, 138 nt, unidentified
  source 1..138: mol_type = other RNA; note = Related to JQHF01000020.1; note = Neisseria mucosa
gcggctacaaacagatgttttgcccttgtttcggggtgactataaacaatgtcagggcttcatgtatccctgttccatactcgattctattgtttatgagcagtagtattgtttttaccaaagagtgtttgtagccgt

SEQ ID NO: 15450 - RNA, 138 nt, unidentified
  source 1..138: mol_type = other RNA; note = Related to CP091516.1; note = Kingella potus
tgaggcataaatagatttgttatcctgattcgggataatttaaaacaatgtaccaagggtaacgcgcctcgtgcagtctgcacttgtcgctaattactccatattttgtttgacttcagtgagagtatttatgcctct

SEQ ID NO: 15451 - RNA, 149 nt, unidentified
  source 1..149: mol_type = other RNA; note = Related to NZ_CP042408.1; note = Lactococcus lactis
taggataataatagattatatgtggggtatccccataagttataaaaatgtttgaagggtttcggctcaaatatctgctattaggcgtataagtaattggcaatcatagcttatacggcattcgctacgctcaggagtattctatccat

SEQ ID NO: 15452 - RNA, 127 nt, unidentified
  source 1..127: mol_type = other RNA; note = Related to NZ_CM001979.1; note = Dickeya sp.
agggctataggcagattttttatcacgaagcgtgatatgtgaaaagaatgtccggcggaatgccatcaatgttttaagatcaccgataacagtttgccggtgagcttaatgagtgcctatagcacct

SEQ ID NO: 15453 - RNA, 126 nt, unidentified
  source 1..126: mol_type = other RNA; note = Related to CP011427.1; note = Pantoea vagans
agggctataggcagatcttttatcacgaagcgtgatatgtgaaaaaaatgtccggcggaatgctatcaatgtgttcaggttgccgataatgggcggccgttgtgcttaatgagtgcctatagttcc

SEQ ID NO: 15454 - RNA, 128 nt, Salmonella sp.
  source 1..128: mol_type = other RNA; note = Related to ABDODY010000002.1; note = Salmonella enterica
agggctataggcagattttttgtcacgaagcgtgatatatgaaaaaaatgtccggtggaatgccgatcaaagtgttaagtaatctgatgaccagattgcaaatgagcttaatgagtgcctatagttcc

SEQ ID NO: 15455 - RNA, 128 nt, Enterobacter sp.
  source 1..128: mol_type = other RNA; note = Related to JAJKGJ010000001.1; note = Enterobacter hormaechei
agggctataggcagattttttgtcacgaagcgtgatatatgaaaagaacgtccggtggattgccgatcaaagtgttaagttacttgatgattagattgcaaatgagcttaatgagtgcctatagaccc

SEQ ID NO: 15456 - RNA, 124 nt, unidentified
  source 1..124: mol_type = other RNA; note = Related to NZ_CTIT01000003.1; note = Yersinia enterocolitica
gggtctataggtagattttttatcgcgaagcgcgatatgtgaaaacaacgttgggtagattgccactgtaaagtgatgcaccagtagtaatggtctgcatagcataatgagtgcctataggccc

SEQ ID NO: 15457 - RNA, 141 nt, unidentified
  source 1..141: mol_type = other RNA; note = Related to SAXY01000032.1; note = Brachyspira pilosicoli
aagcttacagatagatatttcatgttgcatttcgcatgagaagatttattatagcaagagtttttcagtatatagctatatatctgtttatttttttgcaccaagcttggtgcggttttacttaagagtatctgtaagctt

SEQ ID NO: 15458 - RNA, 140 nt, unidentified
  source 1..140: mol_type = other RNA; note = Related to NZ_SAXU01000001.1; note = Brachyspira aalborgi
tagcttacagatagatttttcctgttgatttcgcaggagatgatttattatagggttagtgtttaagtaaaaatgctgctttttctttattccatatactgtgcacagtatatgtcttacataagagtatctgtaagctt

SEQ ID NO: 15459 - RNA, 139 nt, unidentified
  source 1..139: mol_type = other RNA; note = Related to NZ_CP019600.1; note = Brachyspira hyodysenteriae
tggcttgcagatagatttttcaggcgaatcgcttgaggagatttattgtatcgtcaggttttaggacattaaacttcattttttgtcgttggtacatatatatatgtactacacttgtcccgtgagtatctgcaagtca

SEQ ID NO: 15460 - RNA, 136 nt, unidentified
  source 1..136: mol_type = other RNA; note = Related to SAXX01000003.1; note = Brachyspira aalborgi
aagcttgcagatagatttttcttgtcgtttcgcaagaggagattttttgtatcatcactttttaggactgtctgtttgtatatgtatatacagaaagaccttgaaaatttatcgtcccgagagtatctgcaagcca

SEQ ID NO: 15461 - RNA, 161 nt, Bacillus sp.
  source 1..161: mol_type = other RNA; note = Related to LITP01000001.1
ttaggcaagcaaggaacagttgaacttttgatggtggtaatcgctatcttataattaaatgtatctacagatcttcacgctctattctagttgtttatcgaattgtcatatggtatcaacggtatgatttagaaaggtagaactgtacttgtttgcctact

SEQ ID NO: 15462 - RNA, 154 nt, unidentified
  source 1..154: mol_type = other RNA; note = Related to JABMKX010000008.1; note = Paenibacillus tritici
acaagttgtatttgaacttttgatggtgataatcgctatcttatattttaatgtatctacacatctctctgcactattctcattgttggatccaattgtctcacatggtatctacgcggtgatttagaaaggtagaaatgcagcattacttttg

SEQ ID NO: 15463 - RNA, 162 nt, unidentified
  source 1..162: mol_type = other RNA; note = Related to NZ_FCOQ01000017.1; note = Paenibacillus sp.
ataggcaggcaagttgcagttgaacttctggtagtgctaatcgctatcttataaaaagaatgtaactacatatcctacgcgcaattttcagtatttatctaaatgtcgcaatggtttcaacggtatgatttagaaaggtagaactgcacttgtttgcctact

SEQ ID NO: 15464 - RNA, 163 nt, unidentified
  source 1..163: mol_type = other RNA; note = Related to NZ_JAKGAO010000024.1; note = Paenibacillus tarimensis
ttaggcaagcaagatgcagttgacttttggatggtgataatcgctatccaacaacctaaggtaactacgtatcgctatgtactactcgcgctgtttatcgaattgtctcacttggtatcaccggagtaatttagaaaggtagaactgcacttgtttgcctact

SEQ ID NO: 15465 - RNA, 164 nt, Bacillus sp.
  source 1..164: mol_type = other RNA; note = Related to NZ_CP033906.1
tttggcaagcatgaggtaattttaattttaggttgtgaaatcgcaacccgaatatttaatgtattatttatctgcgtcacttttacgtattttctacttttagctaatcgcgtataattttctatttaatttagaaaggtagaatttatccatgcttgcctaag

SEQ ID NO: 15466 - RNA, 156 nt, Bacillus sp.
  source 1..156: mol_type = other RNA; note = Related to NZ_CP082279.1; note = Bacillus amyloliquefaciens
acagcaagggtaagaaaaaattgactttatggcggtgaaatcgccgtctgttatttaaagggtatacttaatttacacgcttattttatcttcgaagttttattcgatttgtctaatcgctattaggagaagggtagaattttaacccttgctgtt

SEQ ID NO: 15467 - RNA, 159 nt, Bacillus sp.
  source 1..159: mol_type = other RNA; note = Related to CP018574.1; note = Bacillus altitudinis
tagcagcaagggtgagaaatttattttatggcggtgaaatcgccgtctgttattttaaagtatatactaaatatgcacgcttattttatcttataaggttttatacgatttttctaaacgctattaggagaagggtagaattttaacccttgctgttgt

SEQ ID NO: 15468 - RNA, 146 nt, unidentified
  source 1..146: mol_type = other RNA; note = Related to PDYK01000012.1; note = Sporosarcina sp.
tggggaagtagggaacaatttacattcgcggtgataatcgctgcgtcttatataaatgtatgatttactcacgtgtatcttatattgttttccgcgtcgtctatgtcggggtaactagaacggtagaattatccctactcccctct

SEQ ID NO: 15469 - RNA, 136 nt, unidentified
  source 1..136: mol_type = other RNA; note = Related to NZ_CP047363.1; note = Macrococcus canis
tgagggaagttgaatttaaagttgtgtaactgcgacttatgctttcaatgtttctatagcgttatcgctatatatatactatgtttattttccatttagaaaatattgtaatcgaaaacggtagaacttccctctt

SEQ ID NO: 15470 - RNA, 155 nt, unidentified
  source 1..155: mol_type = other RNA; note = Related to NZ_RHHV01000019.1; note = Brevibacillus parabrevis
attggggtaggggtattaattgatttccactgttgtaattgcggtggtctataggaatgtcagtagcacattccgttgtactagttaactttatcgcgtaaattgttttatctgtatcgcgctaattaataaggtagaattaaccctcccctttc

SEQ ID NO: 15471 - RNA, 156 nt, unidentified
  source 1..156: mol_type = other RNA; note = Related to NZ_VDZO01000006.1; note = Paenibacillus xylanexedens
atacggggaagggaagtaattgatttccactgttgttactgcggtggtttatagcaatgttaggcacacattttccgatgtctcgctatttttatttgtctcgttaaattttccctactagtaatttaatgaagtagaattccccttcccctcttc

SEQ ID NO: 15472 - RNA, 155 nt, unidentified
  source 1..155: mol_type = other RNA; note = Related to NZ_BOSB01000004.1; note = Paenibacillus lautus
aagaatcggtaggagaggtaattgactaccactgtcgtaaatgcggtggcgaattaaacaaaggttaatacgcattcgttgtctaatttggtctcgttttccttatcggctgttatcgaatagtaataaggtagaattcatcctgccggttctct

SEQ ID NO: 15473 - RNA, 168 nt, Bacillus sp.
  source 1..168: mol_type = other RNA; note = Related to LYUE01000007.1; note = Bacillus siamensis
cagagacggtttggtcatattgatttccactgttgtaattgcggtggtgtattaaaatgtaagggcaaattttcccacgttgtctcttacgctatttactgtactattcgacttttacgattatattatcatgtttttaataaggtagaatacgccaaccgtctctta

SEQ ID NO: 15474 - RNA, 163 nt, unidentified
  source 1..163: mol_type = other RNA; note = Related to NZ_VDST01000009.1; note = Priestia megaterium
agagactgatgagaggtaaaattgatttccactgtttgtaattgcggtggtgtataaaaaggtaagagcagatcttatgcgcctttttcgctattatactttttcgactattttgttaacttgtcgctatgtatcataaggtagaatttcctcacagtctctt

SEQ ID NO: 15475 - RNA, 152 nt, unidentified
  source 1..152: mol_type = other RNA; note = Related to NZ_AUCI01000050.1; note = Salibacterium aidingense
gaaggaaagtgagcggaagattgatctcgctgttgttactgcagtgttatattaaaatgttagtggatactccgcttatccgctacgttattcacattactttaatcgttaatcgcatcaaataataaggtagaatctctcacttccttcct

SEQ ID NO: 15476 - RNA, 235 nt, unidentified
  source 1..235: mol_type = other RNA; note = Related to NZ_KB907919.1; note = Kushneria aurantia
gctgagggttccaacgtgactttctagtgatgctggtgccgcaaggcgccggttcgggtggcggtatcgtcatcatgacggggcgcagactactgctgcttcgcgttggagctgacgcatgaggacaggcgcctcctgcagtgaccctccggggctgctcgaggtctcgccttcactgcaggaggtgactgacccttcgggtctcaaaggtagatggaacgttggaatcctcaca

SEQ ID NO: 15477 - RNA, 235 nt, Pseudomonas sp.
  source 1..235: mol_type = other RNA; note = Related to DAFSJF010000019.1; note = Pseudomonas aeruginosa
gctgagggttccagcatgactttctagtgatgccggtgccgaaaggcgtcggttcggatgacgatttcgtcatcatgacggggcgcagactactgccgcttcgcgttggagcttaggcatgagggcaggcgcctcccgcagcgacccttcggggcggttcgaggtctcaccttcgctgcgggaggtgactgacccttcgggtctcaaaggtagatggaacactggaaccctcaac

SEQ ID NO: 15478 - RNA, 237 nt, Citrobacter sp.
  source 1..237: mol_type = other RNA; note = Related to NZ_RHWV01000005.1; note = Citrobacter farmeri
tctgagagtttcagtatgactttctagtgatgctggtactgagaaggtaccagttcggatgactatttagtcatcatgacggggcgcagattactgttgcttcgcgttagagcttacgcatgagggacagacgcctccagcaacgaccctccggggcggctcgaggtctcgccttcgttgccggaggtgactgacccttcgggtctcaaaggtagatggaacgctggaactctcaaa

SEQ ID NO: 15479 - RNA, 237 nt, unidentified
  source 1..237: mol_type = other RNA; note = Related to NZ_CADEYZ010000005.1; note = Burkholderia gladioli
attgagggtgccagcgtgaccgtttagtgatgccggcgtcgcaggacgttggtcggatgatgacttaggtcgtcgaagagggggcacagattactgtcgcttcgcgcatgagctcccgctagaggcaaatcgcgctccgccgtgaccctaacggggcggctcggtgcctcgccttctcggcggagcgtgacttacccttcgggtatcaaaggtagatgcaacgctggaaccctcaac

SEQ ID NO: 15480 - RNA, 235 nt, Pseudomonas sp.
  source 1..235: mol_type = other RNA; note = Related to JABEMH010000060.1; note = Pseudomonas fragi
gttgagggtcccagcatgactttctagtgatctcagcgtcgaaaggcgctgattcggatgacgacattgtcgtcacgacggggcgcagactactgtggcttcgcgttagagcttccgcatgaggttagccgtctcccgcagtgaccctgcggggcggctcgaggtctcgccttcactgcgggagatgacttacccttcgggtatcaaaggtagatggaacgctggaaccctcaac

SEQ ID NO: 15481 - RNA, 237 nt, unidentified
  source 1..237: mol_type = other RNA; note = Related to SEFB01000022.1; note = Rubrivivax sp.
gttgagggcgccagtttgacttctagttgttgtcagggccgaaaggtgctgacgccgatggcgacttttgtcgtctcgtcggggcgcagatttctgttgcttcgcgttgtagctcccgcttgaggtcaagcctcctcccgcagcgaccctgcggggcggatcgaggcctcaccttcgctgcgggaggtgacttacccttcgggtatcaaaggtagatggaacgctggagccctcgcc

SEQ ID NO: 15482 - RNA, 237 nt, unidentified
  source 1..237: mol_type = other RNA; note = Related to JAHNIZ010000026.1; note = Paraburkholderia fungorum
gctgagagctccaccgtcttcttctagatgatgctagtgcttgggtgctagcgccgatgacgtccgttgacgtcacaaggggcgcagattactgctgcttcacgttgaagctcctgctcgaaggctaagccgcctcccgcgtcgccccctccggggacggtgcgaggacttaccttcgatgcgggaggtgactcaccctagggtgccaaaagtagatggaacgctggagttctcacc

SEQ ID NO: 15483 - RNA, 198 nt, unidentified
  source 1..198: mol_type = other RNA; note = Related to CP000050.1; note = Xanthomonas campestris
gttgagggcgccagtttagatctctagcgttaaggcagttcccgagcgcagcttactgcgtctctctgaaacagctcccgcttgctgctgacgcatcacgcctcctgccgcttcgcgggcgtgtcggggtctcacctcaggatgcgtgatacctcaccaagagcaggtcaaagtagatgtcagactggcgtcctcaac

SEQ ID NO: 15484 - RNA, 202 nt, unidentified
  source 1..202: mol_type = other RNA; note = Related to JAIOAG010000002.1; note = Stenotrophomonas maltophilia
gttgagggcgccagtctagacttctagcgttgacggaagtcggagcgcagcttactgcgtctctctggaagagcacccgcttgtcgctgatgcatcgcgcctcctgccgcccaagggcgggcggctcggggtctcacctcaggatgcgcgacacttcacctagaaagcaggtcaaagtagatgtcggactggcgccctcaac

SEQ ID NO: 15485 - RNA, 201 nt, unidentified
  source 1..201: mol_type = other RNA; note = Related to NZ_RWJW01000004.1; note = Xanthomonas axonopodis
gttgagggtgccagtctaagcatctagcgttgacagatcgtcggagcgcagattactgcgtctctttggaagtgcacccgcttgccgatgacgcgtcacgcctcccgccgcgcaagcgcggccgtgtcggggtctcccctcgggatgcgtgacacctcaccaaaagcaggtcaaagtagatgtcggactggcactctcaac

SEQ ID NO: 15486 - RNA, 237 nt, unidentified
  source 1..237: mol_type = other RNA; note = Related to MTCS02000083.1; note = Haliangium sp.
gttgagggcgccagaggagacttctagttgatgccggcaaatgccggcgccgacatgtggccgtgcgctgcatgtaatcgggacgcagagtctgcgatccttcggcatagctcgcgcttgatgctaaggcgtgtcgcgcactgccgcctgcggcggatcgcggcgaggtcttgcttcagcgcgcgacacgtctcacccatggggtgtcaaagtagatgactcgctggcgccctcaac

SEQ ID NO: 15487 - RNA, 236 nt, unidentified
  source 1..236: mol_type = other RNA; note = Related to JAAXRA010000003.1; note = Rhizobium laguerreae
gttgagggcgccagtgagtctttctagatgacgccggttcgccggcggcgacatctggctaatggccaggtgtctcggggcgcagattctgcagctcttaggctaagcgtccgctcgaagctaaggcacatcacgcaacgccgccttgcggcggatcgcgtcgaggtcttgctacgtcgcgtgatgtgtctcacccccagggtgtcaaagtagaatgacaacctggcgccctcaac

SEQ ID NO: 15488 - RNA, 239 nt, unidentified
  source 1..239: mol_type = other RNA; note = Related to NZ_NWSJ01000022.1; note = Rhizobium anhuiense
gttgagggcgccagtgagtctttctagatgacgccggtgtaccggcggcggcatctggtcactggccaggtgtctcggggcgcagattctgcagctctcaggctaagcgtccgctcgaagctaaggcacatcgcgcaacgccgccgcgtggcggcggtcagtgtcgaggtctcgcttcgtcgcgcgatgtgtctcacccccagggtgtcaaagtagaatgaccagttggcgccctcaac

SEQ ID NO: 15489 - RNA, 252 nt, unidentified
  source 1..252: mol_type = other RNA; note = Related to NZ_BCYZ01000072.1; note = Sphingomonas pruni
gttgagggctcctgtgggatcgcatagttgacgtcgccgcatcagctttgctgttgtttcgacggcagcatatggtcttcgggccatgtgcttcggggcgcagaatctgctgctctcaggacaagccttcgctcgatgctaaggcacatcgcgcaacgccgcctgcggcggatcgcgtcggtgtctagctacgtcgcgcgatgtgtctcacccccagggtgtcaaagtacgtgacctcctggagccctcaac

SEQ ID NO: 15490 - RNA, 241 nt, unidentified
  source 1..241: mol_type = other RNA; note = Related to NZ_CP021467.1; note = Komagataeibacter europaeus
gttgagggcgccgcagggactttctagttgatgccggtcgagaggccggcgccgggccgaaagccttcgggcttgacgtccatgggccgcagactctgcgtgtctacggaaaagcgggcgcttgaagctaaggcagatcgcgaagtgccgccttcggcggttcgcggtgatgtcttgctccactccgcgatctgtctcaccccttgggtgtcaaagtagatggtcgggtggcgccctcaac

SEQ ID NO: 15491 - RNA, 238 nt, unidentified
  source 1..238: mol_type = other RNA; note = Related to SADI02000018.1; note = Mesorhizobium sp.
gttgagggctccctcgaaggtgtctagttgatgccggttaccccggcaccgatgggtggtcttcgggccgctcattcacggagcgcagattctgcgtctctttggccaagcgtccgctcgatgctaaggcatgtcccacagcgcccgctcaagggcgggccggggcgatgtcttgctcgctgcgggacatgtctcacccccagggtgtcgaagtagatgtcccggtggagccctcaac

SEQ ID NO: 15492 - RNA, 238 nt, unidentified
  source 1..238: mol_type = other RNA; note = Related to RZQP01000036.1; note = Mesorhizobium sp.
gttgagggctccatcgaaggtgtctagttgatgccggtcattccggcaccgatgggcaatcttcggattgttcattcacggactgcagattctgcagctctttggccaagcgtccgcttgatgctaaggcatgtcccacagcgcccgcccaagggcggttcggggcgatgtcttgctcactgcgggacatgtctcaccccttgggtgtcgaagtagatgtcccggtggagccctcagc

SEQ ID NO: 15493 - RNA, 238 nt, unidentified
  source 1..238: mol_type = other RNA; note = Related to LMHK01000002.1; note = Devosia sp.
gttgagggttccattcggacgttctagttgatgccggccccccgccggcacctgcatccagccgccgtgctgtttgctcggggcgcagattctgcagctctttggtctagctcgcgcttgaggccaaggcatctcccacatcgtccgcctgacggcggcgcagggcgtagccttcctcgatgcgggagatgtctcaccttttcggtgtctaagtagatgactcggtggaaccctcagc

SEQ ID NO: 15494 - RNA, 227 nt, unidentified
  source 1..227: mol_type = other RNA; note = Related to JAAOYS010000006.1; note = Dyella sp.
gctgagggggccagttccttctgtttagttcagccacttcggtggcgccagcgcatgtcttccatgctggtggggcgcagactctgttgcctcctgtaatagctctcgcatgatgctcaggcaggtcacgcaatggtcgcgagcgaccggagcgaaagccttcctccatcgcgtgacctgtctcaccctacgggtgtcaaagtagatggaagactggctccctcagc

SEQ ID NO: 15495 - RNA, 231 nt, Bacillus sp.
  source 1..231: mol_type = other RNA; note = Related to NADW01000002.1
gttgagggagccagtcccttccgtttagttcacgtcgcctcgggcggcgccattgcatgggattccatgttttgggggcgcagattctgctgccttctgtaatagctgtcgcatgatgctcaggcaggtcacgcaatgcccgcgtagcggacagagcgaaagcctcccttcatcgcgcgacctgtctcaccctacgggtgtcaaagtaaatggaaaactggctctctcagc

SEQ ID NO: 15496 - RNA, 232 nt, unidentified
  source 1..232: mol_type = other RNA; note = Related to QQSY01000005.1; note = Dyella solisilvae
gctgagggcgccagtggggaattctagttagccgggcctagcccggtgccggcttacagttaaccgtaagtaagcggggtgcagagtctgcttcccttcgtattagctctcgcttgatgctaaggcaggtcacacgattgccgctgcgcggcacgtgcggatgtcttactgcatcgtgcgacctgtctcaccctacgggtgtcaaagtagatgacccactggagccctcagc

SEQ ID NO: 15497 - RNA, 225 nt, unidentified
  source 1..225: mol_type = other RNA; note = Related to JACRPC010000021.1; note = Rhodospirillales bacterium
gctgagggcgccacgccgtgtgtctagttgacgctggcactggccagcggcgacaggcggttttcagacccctgtccacggggagcagattctgcgtcctttcggaaaagcgtcggcttgcggctaaggccggtcacgccttatctcgcggcgaagtctggcggcaaggcgcgaccggtctcacccttcgggtgtcgaagtagatgacgatgtggcgtcctcagt

SEQ ID NO: 15498 - RNA, 230 nt, Pseudomonas sp.
  source 1..230: mol_type = other RNA; note = Related to CP032456.1; note = Pseudomonas savastanoi
gttgagacatccaatctagattctagcttcggcgtacattcctagaatgttgctgccatgatgagttggatactcagctcgtcactgggcgcagactactgctgccctatgtcatagctcctgcttgcggttaagcgctcacgccacagtttggtggtgtggccttccaactgcggcgcgagcactcaccctccgggtgtcaaagtagatgaaggattggacgcctcaac

SEQ ID NO: 15499 - RNA, 230 nt, Pseudomonas sp.
  source 1..230: mol_type = other RNA; note = Related to NZ_CP018420.1; note = Pseudomonas veronii
gttgaggcatccaatctagattctagctccggcgcacgttcctagaatgttgctgccatgatgggttggattctcaactcatcaccgggcgcagaatactgctgccctatgtcttagctcctgcttacggttaagcgctcacgccacagcctagtggcgtagccttctgcccgcggcgcgagcactcaccctgcgggtgtcaaagtagatgaaggattggacgcctcaac

SEQ ID NO: 15500 - RNA, 230 nt, Pseudomonas sp.
  source 1..230: mol_type = other RNA; note = Related to PPEF01000002.1; note = Pseudomonas protegens
gttgaggcatccaatctagattctagcttcggcgtacgttcctggaatgttgctgccatgatgggttggattctcagctcatcaccgggcgcagattactgctgccctatgtcttagctcctgcttgcggttaagcgctcacgccacagcctagtggcgtagccttctgcctgcggcgcgagcactcaccctgcgggtgtcaaagtagatgaaggattggacgcctcaac

SEQ ID NO: 15501 - RNA, 232 nt, Pseudomonas sp.
  source 1..232: mol_type = other RNA; note = Related to CP077977.1; note = Pseudomonas aeruginosa
gttgaggcaaccaatctagattctagcttcggcgtacgttcttcgggacgttgctgccagatgggtcaagcttcacggctcatcaccgggcgcagactactgcagccctatgtattagctcctgcttacggctaagcgctcacgccacagcctagtggcgtaagccttctgcctgcggcgcgagcactcaccctgcgggtgtcaaagtagatgaaggattggaagcctcagc

SEQ ID NO: 15502 - RNA, 233 nt, Pseudomonas sp.
  source 1..233: mol_type = other RNA; note = Related to NZ_LT629756.1
gttgaggcgaccagtctagattctagcatcggcgtgcattcctggaatgttgccgccaagacgagtcaggctttaagactcatctaccgggcgcagactactgctgctctatgtcctagcccccgcttacggttaagcgctctcgccacagttcacgtggcgtggccttcggcctgcggcgggagcactcaccctgcgggtgtcaaagtagatgaaggattggaagcctcaac

SEQ ID NO: 15503 - RNA, 232 nt, Pseudomonas fluorescens
  source 1..232: mol_type = other RNA; note = Related to NZ_CABVIT010000001.1
gctgaggcaaccaatctagattctagctccggcgtgcgttcttagaatgttgccgccaagatgagtaggcttcacaactcatctaccgggcgcagattactgttgccctatgtcctagcccttgcttacggctaagcgctcacgccacagcctagtggtgtatgccttctgcctgcggcgcgagcactcaccctgcgggtgtcaaagtagatgaaggattggaagcctcagc

SEQ ID NO: 15504 - RNA, 232 nt, Pseudomonas sp.
  source 1..232: mol_type = other RNA; note = Related to FNJJ01000006.1; note = Pseudomonas guguanensis
gctgaggcaaccaatctagattctagcttcggcgtacatccttgagatgttgccgccaagatgagtcacgcttcacgattcatctaccgggcgcagattactgctgctctatgtactagcccctgcttacggctaagcgctcacgccacagcctagtggcgtggccttctgcctgcggcgtgagcactcaccctgcgggtgtcaaagtagatgaaggattggaagcctcagc

SEQ ID NO: 15505 - RNA, 231 nt, unidentified
  source 1..231: mol_type = other RNA; note = Related to JAESND010000005.1; note = Jeongeupia naejangsanensis
gttgaggcatccggtctaagcaatctagattcggtgcgcgtcgaagaggacgtaaccaccatcgatgcgcctcggcgtatcgaccgggcacagactactgtcgctctatgtaacagcccccgcttacggctaagtacgcccgccacaaggctacgtggcgaggtcttcggcttgcggcgggcgtactcaccctgcgggtgtcaaagtagatgacagactggaagcctcaac

SEQ ID NO: 15506 - RNA, 229 nt, Chromobacterium sp.
  source 1..229: mol_type = other RNA; note = Related to CP029554.1; note = Chromobacterium phragmitis
gttgaggtctcctgtcaaagaaatctagatccggtgcgcgtcggtatgacgcagccaccattggtgtactttggtacatcaaccgggcgcagactactgccgccctatgtattagctcctgcttacggctaattatgcccgccacagccaacgtagcgaggtcttctgcctgcggcgggcatcatcaccctacgggtgtcaaagtagatgacagactggaaacctcaac

SEQ ID NO: 15507 - RNA, 229 nt, unidentified
  source 1..229: mol_type = other RNA; note = Related to FOZE01000001.1; note = Mitsuaria sp.
gttgaggcatccagtctgaaagtctagattcggtgcgcgtcgagaggacgcagccaccattgatgagcatcggctcatcaaccgggcgcagactactgccgctctatgaaccagctcctgcttacggctaagccctcccgccacaaggttacgtggcgtagccttctacttgcggcgggagacctcacccagagggtgtcaaagtagatggatgattggaagcctcaac

SEQ ID NO: 15508 - RNA, 224 nt, Alcaligenes faecalis
  source 1..224: mol_type = other RNA; note = Related to NZ_CP013119.1
gttgaggcatccagtctaactttctagattcggtgagcgttgagagaacgcagccaccagcgcacttcggtgtgttaaccgggcacagactactgatgctctatgatttagctcccgctcacggtcgagggctccctccacgcacacgtggcgagggcttcggtgcgtggagggagacctcaccctacgggtgtcaaagtagatgaatgattggaagcctcaac

SEQ ID NO: 15509 - RNA, 234 nt, Pseudomonas sp.
  source 1..234: mol_type = other RNA; note = Related to AKJM01000112.1
gttgaggcaaccaatctcagaagtctagattcggtgcgcgttgttgttaaggacgcaaccaccattgatgcgtttcgacgcatcaaccgggcgcagactactgctgctctatgttttagcccccgcttacggctaagcgctcccgccacaaggctacgtggcgagggcttcggcttgcggcgggagccctcaccctgcgggtgtcaaagtagatgacagattggaagcctcaac

SEQ ID NO: 15510 - RNA, 228 nt, Pseudomonas sp.
  source 1..228: mol_type = other RNA; note = Related to NZ_LT629691.1; note = Pseudomonas thivervalensis
gttgagacgaccagtctgaaatctagattcggtgcgcgttgaacagaacgcaaccaccattgatgcgcttcggctcatcaaccgggcgcagactactgccgctctatgatatagcccttgcttacggccaagcgctcccgccacacgcgacgtggcgaggtcttctgcctgcggcgggagccctcaccctacgggtgtcaaagtagatgaaggactggaagcctcaac

SEQ ID NO: 15511 - RNA, 216 nt, unidentified
  source 1..216: mol_type = other RNA; note = Related to NZ_VEHL01000001.1; note = Bordetella sp.
gttgagagcaccggtttttccatctagttgaagaagtggcttcgcgctactgaaccatacttttggtaccggactcagactactgtagatcctctggaatagcatccgcttgcggctaaggttacccgtcactctaccgtggcgaggacttcggatcgtgacgggtaatctcacccccgcgggggtcaaagtagatggaaaactggcgttctcaac

SEQ ID NO: 15512 - RNA, 217 nt, unidentified
  source 1..217: mol_type = other RNA; note = Related to NZ_CP028901.1; note = Orrella marina
gttgagagcgccggttcttttgtctagttgaagaagtggcttcggccatggaaccataccttttggtaccggactcagactactgcagctcctatggaatagcgtctgcttgcggccaaggtcgcccgtcactcttaccgtggcggtgacttcggtgagcgacgggcgatctcacccccttgggggtcaaagtagatggaaaactggcaccctcaac

SEQ ID NO: 15513 - RNA, 214 nt, unidentified
  source 1..214: mol_type = other RNA; note = Related to JACRAR010000013.1; note = Betaproteobacteria bacterium
gttgagggcgccaattattccatctagttgacgccgtggtttcgtgccacggagccatacttcggtaccggactcagactactgcagttctatggaatagcatccgcttgcggctaaggtcacccgtcactagtccgtggcgtggccttcggctagcgacgggtgatctcaccccctcgggggtcaaagtagatggaaaattggcgttctcaac

SEQ ID NO: 15514 - RNA, 214 nt, unidentified
  source 1..214: mol_type = other RNA; note = Related to QUNA01000002.1; note = Paraburkholderia sp.
gttgagggcgccggtttagctatctagttgacgccgcggcttcgtgccacgggaccatacttcggtaccggactcagactactgcagttctatggaatagcatccgcttgcggctaaggtcacccgtcactagctcgtggcgagggcttcggccagcgacgggcgatctcaccccctcaggggtcaaagtagatgggaaattggcgtcctcaac

SEQ ID NO: 15515 - RNA, 233 nt, unidentified
  source 1..233: mol_type = other RNA; note = Related to NZ_KE386569.1; note = Methylobacter luteus
gttgaggtctccttattccaaagtctagatgaagcccactttcttcggagatgtcgggaaccacatggcgctaacgcgccatgaccgggcgcagattgctgtaagccctatgattaagctcacgcttgcggctaaggcctctcgccacaaagctcgtggcggagtcttcggctttgcggcgagaggtctcacccttcgggtgtcaaagtagatggcagattggaaacctcaac

SEQ ID NO: 15516 - RNA, 226 nt, unidentified
  source 1..226: mol_type = other RNA; note = Related to JAIETD010000002.1; note = Methylobacterium sp.
gctgagggagcctcgtgaaatctagtgatcgtcggtggtaactcgccgacggcggtcggttcggtgacgagccgatcggggacggggactaccccgccccttcgagtgagcgtccgcatgctgccaaggctgggcccaccccgaattgcgtcgggtgtctcctgccggggcgggcctagcctcgccagaggcgagtcagagtagatgctcacgaagcgccctcagc

SEQ ID NO: 15517 - RNA, 245 nt, unidentified
  source 1..245: mol_type = other RNA; note = Related to CABVPY010000024.1; note = Burkholderia lata
gctgagacctccggtcaaacgctagcttgtgtcatggcttcggccatgaacctttgtcgagagacgtggcggccgagtaggcctgccttagattgagctcgcgcatagcctgagatcggcgacacgccgcggacgctggcggaaaagtctggctgcgacgtgtcgccgaccacagggcttgcgggctaccgataccgtgacaacacacaaaacagccaaagtagctccagccggatggtttcagc

SEQ ID NO: 15518 - RNA, 229 nt, unidentified
  source 1..229: mol_type = other RNA; note = Related to JAFCZG010000487.1; note = Deltaproteobacteria bacterium
gctgagggcaccacaaattgcatctagttaatgttggactaacaatccagctacagcgtacttggttcatctgggtacgattgtggggagcagattactgctacttcttgtttgagcgggcgcttgcgctaaggtctgtcacgctttgctcttggcgagggtcttgcggcaaaccgcgacagatctcacctaaaggtgtcaaagtagatgtgtagttggtgtcctcagc

SEQ ID NO: 15519 - RNA, 228 nt, unidentified
  source 1..228: mol_type = other RNA; note = Related to NZ_VIKR01000006.1; note = Aliikangiella marina
gctgagggcaccgcaaattgcttctagttaatgttggcctaactagtcaactacaacgtgcttttatctttattgcacgattgaggggtgcagaatactgctactctttgtttgagcgagcgcttgcgctaaggtctatcgcgctttgcgcgtggcgaagacttgcggcaaaccgcgatagaactcacctgacggtgtcaaagtagatgcatatttggtgccctcagc

SEQ ID NO: 15520 - RNA, 228 nt, unidentified
  source 1..228: mol_type = other RNA; note = Related to JAESRL010000013.1; note = Porticoccaceae bacterium
gctgagggcaccaacaattgcttctagttaatgctggctttaaaaaccagttacatcacgcttggttatatccggcgtggttatggggtgcagaatactgctacttcttgtttgagcgtgcgcttgcgctaaggtctgtcgtgctttacgcgtggcggagtcttgcggcaaaccacgacagatctcacctaaaggtgtcaaagtagatgcatagttggtgtcctcagc

SEQ ID NO: 15521 - RNA, 234 nt, unidentified
  source 1..234: mol_type = other RNA; note = Related to NZ_CP034142.1; note = Marinobacter sp.
gttgagggttccagttgatgtatctagttcacgctgaaccggttcttccgggttggcaacagtgtgacacactagatttgtcacacttacggagagcagattactgcgactctatggatgagcttgcgcttgcgctaaggtttgtcgcgctatccacgcggcggggactggcgggcaagcgcgacaaatctcacctaaaggtgtcaaagtagatgcatcgctggaatcctcaac

SEQ ID NO: 15522 - RNA, 215 nt, unidentified
  source 1..215: mol_type = other RNA; note = Related to VENF01000020.1; note = Methylophaga sp.
actgggagtgccggatgactcatctagtgcacgttagattgctaacgacgcttttttcaactgaaaaaagtgggagcggagactactccagcttctcggccaagcccttgctcgtaattaagcgtgtcgcgtctgcgcctgcggcgttaccttcttggcttgccacgacaccatcccctatgggtcagagtagatgagtcgaaagcactctcagt

SEQ ID NO: 15523 - RNA, 216 nt, unidentified
  source 1..216: mol_type = other RNA; note = Related to NZSL01000007.1; note = Methylophaga sp.
actgggagtgccggatgacttatctagtgcatgttagtttactaactacgcttttttctgttgaaaaaagtgggggcggagattacttcagcttctcgggcaagcctttgcttgtggctaagcgtgtcgcgcctgcacctgcggcgttacctccttggcttgtcacgacacctacccctttcgggtctgagtagatgggtcgaaagcactctcagt

SEQ ID NO: 15524 - RNA, 219 nt, unidentified
  source 1..219: mol_type = other RNA; note = Related to NZ_CP013376.1; note = Burkholderia cepacia
tctgaggcggccacgtcaggtctagtgaaaccccatctagcgatagatgggtgggcccctagcaataggagagagccgaagtcggtctctcgcggtggcagcaggcgcattaggcaaaatcagccgaaactgtgccttaacgctcgcggtctcgctgttcagtttcggctgattctgcgaaaaacaattcaaagtagatgaaaacctggtcgcctcaga

SEQ ID NO: 15525 - RNA, 231 nt, unidentified
  source 1..231: mol_type = other RNA; note = Related to QBMO01000003.1; note = Alphaproteobacteria bacterium
tctgagagcgccaaagtgaggtgtttagctcatgccgcacctaacgcgtgcggagcggtgctcgcctgcgagggcgagtggcctcgggcagcagcttctgcttgcctgcgaactagccaacttaagtggcaattcctcagcaaggcactttccggtgcgaagtcttccgccgcgccttgctggggagccgccttcggcggtcaaagtaaatgactccttggcgctctcagg

SEQ ID NO: 15526 - RNA, 231 nt, unidentified
  source 1..231: mol_type = other RNA; note = Related to JABJCF010000323.1; note = Nitrospina sp.
tttgagagcgccaatggagaaatttagctaatgctgtattacataatacagtacggctttctcccgcgagggggaaaagcttcgggcggtggattccacctgcctacgtttaagcagtcttctgttgcaaaatatagccaagccactagttggtgcgaagtcttccctagtgccttgcctattttccgcataaaccgcggtcaaagtaaatgactccttggcgctctcgat

SEQ ID NO: 15527 - RNA, 235 nt, unidentified
  source 1..235: mol_type = other RNA; note = Related to NZ_FOYI01000015.1; note = Poseidonocella sedimentorum
gttgagagcgccaaagtgaaccatttagcaaacgcggccagtgtagactggcagcggataggcgaatgcttgaaagagcacacggcctcgggtgaaggattccgcaagcccgcgatgaagctcactacagcgtcaaactacaaggaaagacacgctgacgtcgaagtctcctacgtgtcttcccttgtcgtcgccccaaggggctcgaagtaaatggaaccgtggcgctctcagc

SEQ ID NO: 15528 - RNA, 233 nt, unidentified
  source 1..233: mol_type = other RNA; note = Related to JAHLLJ010000012.1; note = Deltaproteobacteria bacterium
tttgaggatgccacatggataatctagttttcgctggttcgctaaccagtggcgatggacctgtaagagggttcattttggagcgcagattgctgcgtctctacgaaatagcctttgcttctgaacaaggctaggaacgtcgtgcgacgctacgtcctgcggagccttgctgcacgacgttcctaccctcgcccttcgggcgtcaaagtagattaacatgtggcatcctcatt

SEQ ID NO: 15529 - RNA, 225 nt, unidentified
  source 1..225: mol_type = other RNA; note = Related to JACHBD010000013.1; note = Rhizobium lentis
gttgagggttccccgcgatgtctagtggatgtcgattcgaaaggattggcaccgatgggccttcgggccctgggccgtcgattacgacgtgttcgcgatcaagcgtccgcttgatgatatccttgatcgaaacgtacggccatggccgccgcagcgcacgtctcgcttacgtctcgatcaacgaaaccctatgggggtcaaagtagatggcgtggaactctcaac

SEQ ID NO: 15530 - RNA, 225 nt, unidentified
  source 1..225: mol_type = other RNA; note = Related to JAAXSV010000011.1; note = Rhizobium laguerreae
gttgagggttcctcgcgatgtctagtggctgtcgattcgtgaggatcggcaccgacgggccttacagccctgggccgtcgattacgacgtgttcgcgatcaagctcccgcttgatgatatccttgatcgaaacgtacgtccaaggccggcgcagcgcaagtctcgcttacgtctcgatcaaagacaccctaaaggggtcaaagtagatggcgtggaactctcaac

SEQ ID NO: 15531 - RNA, 225 nt, unidentified
  source 1..225: mol_type = other RNA; note = Related to WUFA01000001.1; note = Rhizobium leguminosarum
gttgagggttcctcgcgatgtctagtggctgtcagttcgagaggattggcaccgacgggccttcgggccctgggccgtcgattacgacgtgttcgcgatcaagcgtccgcttgatgatatccttgatcgaaacgtacgaccgaggtcgccgcagcgcatgcctcgcttacgtctcgatcaaagacaccctatgggggtcaaagtagatggtgtggaactctcaac

SEQ ID NO: 15532 - RNA, 246 nt, unidentified
  source 1..246: mol_type = other RNA; note = Related to NZ_VNHV01000015.1; note = Maritimibacter alkaliphilus
gttgagagcgccacgcgatgtctagtggttgccggggtaacgaccggcaccgttggtgtcacgtcctgcccgcaggaggtgatgcctgggccgtcgattgcgatgggctcacggtcaagctttcgcttgatgctcaacttgatcgaaccgcacgaccttgcggtcgccgcagcggtaggctgacttgcgatccgatcaagctcaccctgaagggtggatagtagatgcgaacgtggaactctcaac

SEQ ID NO: 15533 - RNA, 238 nt, unidentified
  source 1..238: mol_type = other RNA; note = Related to NZ_PGOI01000009.1; note = Pseudorhodobacter sp.
gctgagaatgccgcgcgatgtctagtggttgccggttgcggcaccgttggggccatcgttcagcgatggacgaggtctctgggccgtcgattgcgacgtgctcacggtcaagctggtgcttgatgctaacctcgatcgaagcacacgacctgcggtcggcgctgcgcgtgcctcgcttgtgctccgatcgaggtcaccctgtcgggtgaatagtagatgaacgattggcattctcagc

SEQ ID NO: 15534 - RNA, 228 nt, unidentified
  source 1..228: mol_type = other RNA; note = Related to QOCE01000045.1; note = Phaeobacter gallaeciensis
gttgagaccgccacgaagggcttttggatgacgccggttgcaagagccggcgccgatgttcggttgagaaatcggatattgtgggcagcagattctgcgcgccttcggactagctttcttgtagcgctgacgtggatcgcgccgtgccacgatgcgcggcctttctacacggcgcgatccgcaccacccttgcggagtcgaagcaaatgactctctggcggtctcaac

SEQ ID NO: 15535 - RNA, 228 nt, unidentified
  source 1..228: mol_type = other RNA; note = Related to JAGHRB010000006.1; note = Ruegeria sp.
gttgaggccaccaagaaggaaatttggatgatgtcggctgcaagagccgacgccgaaatccggtcgaaagaacgggttttatgggcagcagaatctgcgtgcctgcggaatagcttccttgccgcgctgacgtggatagcgccgtgcgacgatgcgcggcctttctgcacggcgctatcctccccatccttgcggagtcaaagcaaatgactgcttggcggcctcaac

SEQ ID NO: 15536 - RNA, 227 nt, unidentified
  source 1..227: mol_type = other RNA; note = Related to CP036420.1; note = Cereibacter sphaeroides
gttgaggccgccatgttgagggtatctggatgacgccggtcgcaagggccggtgccgatgttggacgaaagtcgagcatactgggcagcagaatctgcgcgccttcggaaaagcttccttgcagcgctgacgtggatcacgccgcatcacggtgcggggtcttcctatgcggcgcgatcctccccaccagaggtggtcaaagcagatgacctcttggcggcctcagc

SEQ ID NO: 15537 - RNA, 223 nt, unidentified
  source 1..223: mol_type = other RNA; note = Related to LR743509.1; note = Hyphomicrobium sp.
gctgagaccgccgaagagtctatttagatgatgctggggcgagagccctggcaccgccggccgcaaggccggaggcggggcgcagattctgcgaccctacggaaaagctcgcttcggcagctgatcatcgtcgagctcgctctcggatcggtgtcttcccgcgcgaactcgacgatcctcaccctacgggtgtcaaagtaaatgaccatttggcggcctcagc

SEQ ID NO: 15538 - RNA, 226 nt, unidentified
  source 1..226: mol_type = other RNA; note = Related to NZ_JACHCP010000006.1; note = Rhodanobacter sp.
tctgagggcgccacgtgtctgagtttaggtatgccccatggaatacttaggtattcttagacgaagcgatttttcgtcaggatctggctacttgccgggtctttggaaaagcaggtgcttgcgtgcaagacacctagcgacgggacggctggcggagtcttgcctagcgtcgctaggcggctcgcccgttgggcgtcaaagtagatgaggtcgtggcgtcctcaga

SEQ ID NO: 15539 - RNA, 206 nt, unidentified
  source 1..206: mol_type = other RNA; note = Related to PZOX01000020.1; note = Vitiosangium sp.
tttgagggccgccaagaggacatcttagcgttccccaccggattccggtgggcccatacggaaactcggatactgagtttcttggaagtagcccccgcaatggcgcaaggtgcggtgaagcccgcctggtccgacgtgcgcctgggtcggtcttcaccgtacctcgctccgcagtcaaagtaagatgtcctcttggcgccctcatc

SEQ ID NO: 15540 - RNA, 204 nt, Pseudomonas sp.
  source 1..204: mol_type = other RNA; note = Related to NZ_VJOY01000004.1; note = Pseudomonas mangiferae
gctgagggctccgctgtagcggaatctagtatcccgcacattgtgcggggcgtttttgggagcaaactatgcttaccgttgaacgatctcacgcctactggagggcggcaggctccatggtgttcgctatcgaagtctggcgccagaagcctgccatccgccagggcggaatttaaaggtagatgagtcgctggagctctcagc

SEQ ID NO: 15541 - RNA, 204 nt, Pseudomonas sp.
  source 1..204: mol_type = other RNA; note = Related to NZ_JH635998.1
gctgagggctccgcagtagcggaatctagtatcccgcgcgttgcgcggggcgtttttgggagcaaactatgcttaccgtcggacgatctcacgcctactggagggcggcagccttcatggtgttcgctatcgaagtctggcgccagaaggctgccatccgccagagcggaatctaaaggtagatgaatcgctggagctctcagc

SEQ ID NO: 15542 - RNA, 204 nt, Pseudomonas sp.
  source 1..204: mol_type = other RNA; note = Related to NZ_CP007637.1; note = Pseudomonas simiae
gctgagggctccgcagtagcggaatctagtattcccgcgcgttgcgcggggcgttttgggagcaaactatgcttaccgtcgaacgatctcacgcctgctggaggttggcagccttcatggtgttcgctatcgaagtctggcgccagaaggcttccatccgccagggcggaatctaaaggtagatgagtcgctggagctctcagc

SEQ ID NO: 15543 - RNA, 201 nt, Pseudomonas sp.
  source 1..201: mol_type = other RNA; note = Related to CP031146.1; note = Pseudomonas plecoglossicida
gctgagggctccgcagtagcggaatctagtatcccgcacgatgtgcgggcgttaagggagcaaattatgcttgccgtcgaacgatctcacgcttccaggaggtataagccttctacggctcgctatcgaagtcttgcggcaagaaggcttatatccgccagggcggagcttgaaggtagatgactcgctggagctctcagc

SEQ ID NO: 15544 - RNA, 204 nt, Pseudomonas sp.
  source 1..204: mol_type = other RNA; note = Related to NZ_JAHSTV010000019.1; note = Pseudomonas farris
gctgagggctccgcagtagcggaatctagtatcccgcgcgttgcgcggggcgttattgggagcaaactatgcttaccgtcgaacgatctcacgcctactggagggcggcagccttcatggtgttcgctatcgaagtctggcgccagaaggcttccatccgccagggcggaatctaaaggtagatgaatcgctggagctctcagc

SEQ ID NO: 15545 - RNA, 202 nt, Pseudomonas sp.
  source 1..202: mol_type = other RNA; note = Related to NZ_CP085704.1
gctgagggctccgcagtagcggaatctagtatcccgtgcgttgtgcgggacgataagggagcaaattatgcttgccgttggaacgatctcacgcctaccggaggtgggaaccttcctttactcgctggcgatgtctggcgatcagaaggctccctccgccagggcggaatctaaaggtagatgaatcgctggagccctcagc

SEQ ID NO: 15546 - RNA, 201 nt, Pseudomonas sp.
  source 1..201: mol_type = other RNA; note = Related to NZ_CP061943.1
gctgagggctccgcattagcggaatctagtatcccgcacgttgtgcgggcggcttgggagcaaattatgcttaccgtcgaacgatctcacgcgtactggaggttggcagccttcgtggtgttcgctatcgaagtctggcgccagaaggcttccatccgcagggcggaattcaaaggtagatgacccgctggagctctcagc

SEQ ID NO: 15547 - RNA, 202 nt, Pseudomonas sp.
  source 1..202: mol_type = other RNA; note = Related to NZ_UVZC01000005.1; note = Pseudomonas viridiflava
actgagggctccgcagtagcggaatctagcatcccgcacgttgtgcgggcgttaagggagcaaactatgcttgccgtcgaacgatctcacgcttccaggaggtataagccttctcaggctcgctatcgaagtcttgcggcaaagaaggctcatatccgccagggcggaatctaaaggtagatgactcgctggagccctcagt

SEQ ID NO: 15548 - RNA, 202 nt, Pseudomonas sp.
  source 1..202: mol_type = other RNA; note = Related to CP024630.1; note = Pseudomonas aeruginosa
actgagggctccgaagtagcgaaatctagcaccctgcactctgtgcaggacgtttagggagcagactctgcttacccatggaacgatctcacgctgacaggaggttggggaccataaaattacgctacgatgtcttgcgattttacggtccccatccgccagggcggaatctaaaggtagatgaaacgctggagccctcagg

SEQ ID NO: 15549 - RNA, 203 nt, Pseudomonas sp.
  source 1..203: mol_type = other RNA; note = Related to NZ_AVEP02000116.1; note = Pseudomonas avellanae
actgagggcttcgcaatagcggaatctagtatcccgcactctgtgcgggacgtttagggagcaaactctgctttccgttggaacgatctcacgctgacaggaggttaagagcctgaaaattacgctatcgatgtctggctattttaaggctctcatccgccagagcggaatctaaaggtagatgaaacgctggagccctcagt

SEQ ID NO: 15550 - RNA, 204 nt, Pseudomonas sp.
  source 1..204: mol_type = other RNA; note = Related to MKGS01000151.1
gctgagggccccgcagtagcggaatctagtaccctgcacgctgtgcaggacgttaaagggagcatattttgctttccgtaggaacgagctcacgctttccgttggttaagagcctcaaaatcacgcaaacgaggtcttgctatttcgaggctctcatccgccagagcggaatctaaaggtagatgaatcgctggagccctcagc

SEQ ID NO: 15551 - RNA, 200 nt, Pseudomonas sp.
  source 1..200: mol_type = other RNA; note = Related to NZ_FYDX01000020.1
gctgagggctcccacttagcgaaatctagaatcctctagactctagaggctgtaggaagcaggttatgctgtccataggaagaacccccgcaaaacaggaggttgagcacctcgttcctacgctggcgttgtcttgcgatctcgaggcgctcatccgcctgggcggaatctaaggtagatgaatcgctggagccctcagc

SEQ ID NO: 15552 - RNA, 201 nt, Pseudomonas sp.
  source 1..201: mol_type = other RNA; note = Related to NZ_CP061723.1; note = Pseudomonas putida
gctgagggctccaacttagcgaaatctagaatcctctagactctagaggctgtaggaagcaggttatgctatccataggaagaacccccgctgaacaggaggttgagcgcctcgctcttacgctggtgtatgtcttgcggtctcgaggcgctcatccgcctgggcggaatctaaggtagatgaatcgctggagccctcagc

SEQ ID NO: 15553 - RNA, 203 nt, Pseudomonas sp.
  source 1..203: mol_type = other RNA; note = Related to NZ_LHVL01000030.1
gctgagagctccgatttagcggaatctagaatcctctgcaattggtagaggctgtaggaagcaggctatgctgtccgatggaagaacattcgcattacaggaggttgggtacctcgcatcttcgccggcggagtcttgcgggcttcgaggcacccatccgccagagcggaatctaaggtagatgaatcgctggagctctcagc

SEQ ID NO: 15554 - RNA, 201 nt, Pseudomonas sp.
  source 1..201: mol_type = other RNA; note = Related to JACVBX010000001.1
gctgagagctccgttttagcggaatctagaatcctctagtaaatagaggctgtaggaggcaggatatgctgtccgaaggaagaactgacgcttcatgggaggatgtgtgcctcgagcctacgcaggcgatgtctggcggtcgcgaggcgcacttccgcccttggcggaacctaaggtagatgactcgctggagctctcagc

SEQ ID NO: 15555 - RNA, 206 nt, unidentified
  source 1..206: mol_type = other RNA; note = Related to NZ_CAKLIV010000056.1; note = Pectobacterium versatile
tctgagagctccgagagcttgaatctaggctcctccaatacttttggaggctgatagggcagctaattgctaaccctcaggttgaactggcgcttacagggaattcacaactcattctactcgtttacgtaagccttacgatcacgagttgtgcattcgctgccgcgaatggaatctaaagtagatgaactcttggaactctcaac

SEQ ID NO: 15556 - RNA, 202 nt, unidentified
  source 1..202: mol_type = other RNA; note = Related to JACVUO010000002.1; note = Pantoea sp.
attgagagctccgtatccttgagtctagtatcctccttaatttggagggctgaggggcaaccaatggtttcccatagtttgaactgacgcatactgggaatacacaactcacacctgtcgccgacgtatgccttgcggctgtgagctgtgcattcgctgcgcgaatggagtctaaggtagatgaagatatggagccctcact

SEQ ID NO: 15557 - RNA, 200 nt, Pseudomonas sp.
  source 1..200: mol_type = other RNA; note = Related to NZ_LPNO01000008.1
gctgcgggctccagtttaaaggaatctagcaatctccccctgctgggagctattagggcacatgttttgtgtaccgaaggacgatccaacgcttacaggaggatccacgactcttcacttggcgctacggagccttgctgcttgagtcgcgcttccgcctgagaggaatcaaaggtagatgaccaactggagcccgcagc

SEQ ID NO: 15558 - RNA, 200 nt, Pseudomonas sp.
  source 1..200: mol_type = other RNA; note = Related to NZ_LIGO01000012.1; note = Pseudomonas corrugata
gctgcgggctccaacttagtggaatctagcaatctccccctagttgggagctactaggacacatactttgtgctccgaaggacgatctaacgcttacaggaggttttctcgactttcacgggcgctacggtgccttgctgttcaagtcgaaaatccacctgcttggaatcaaaggtagatgaccaattggagtccgcagc

SEQ ID NO: 15559 - RNA, 230 nt, unidentified
  source 1..230: mol_type = other RNA; note = Related to NZ_CP014579.1; note = Paraburkholderia phytofirmans
gctgagagcgtccggataatcaccatctagcgtatccctcgttctacggggcgagggcttgatctcgggcgaccgaggtctcagggcactggattaccggtgctcgatggcagaacttgcgcttactggagtaacccaccaccacacgaccagcgtcgtggcctcgcggcgatggcggtgggtttcgccagggcgaattcaaaggtagatggtgaactggcgctcccagc

SEQ ID NO: 15560 - RNA, 223 nt, unidentified
  source 1..223: mol_type = other RNA; note = Related to NZ_CADETV010000001.1; note = Burkholderia anthina
gctgagggcgtccaaatagtcaccacctagtgtatccctccttcgggagggctcgatctcgggtgactgagatctcagggtactggattaccggtgcttgatggcagaacttccgcttactggagtaacccaccaccagcgaccagcgtcgtggccttgcggcattggcggtgggtttcgccagggcgaattcaaaggtagatggtgaactggcgcgctcagc

SEQ ID NO: 15561 - RNA, 225 nt, unidentified
  source 1..225: mol_type = other RNA; note = Related to QBTZ01000001.1; note = Acidovorax sp.
gctgagagtaccgatttagtgatagtctagtttccatagggaggcaactccctgtggtcgagccgtagcttttgctgtggcgaggcttaggagtccgaaagccgaatttgaacttgcgcctacttgcgccgtctcctgcagctggctaccagcgtgtcctcgggccagagcaggagacgtcccgcgagcgggaccaaaggtagatgaaccactggaactctcagc

SEQ ID NO: 15562 - RNA, 228 nt, unidentified
  source 1..228: mol_type = other RNA; note = Related to NZ_LMHZ01000013.1; note = Noviherbaspirillum sp.
gctgagagagccgtattagtggaaagctagaatccataaggggtaacccttgtggctgaaccttagctatatgttgaggtgaggtgtaggatgtccgaacaccaatgattgaaccggcgccaacttgaggacgcctcccgagtctggctaccagcgtaacctcgggtcagatcgggaggcgccccgcaaggcggggccaaaggtagatgaaccactggcaatctcagc

SEQ ID NO: 15563 - RNA, 223 nt, unidentified
  source 1..223: mol_type = other RNA; note = Related to CABFMN010000087.1; note = Xylophilus ampelinus
gctgagagacccggtgtagaaaatctagtgtcccctggctatgtccagggaggcggacccgagtgatcgggtctgcgggacgcggattccgcgcaacctcggacgaactgccgctttactggaggatcagaaccgccaacactcgccgcgtggccttgcggttctggcggtcctggcccgccagggcgggctcaaaggtagatgacttcctgggactctcagc

SEQ ID NO: 15564 - RNA, 213 nt, unidentified
  source 1..213: mol_type = other RNA; note = Related to NZ_VUYU01000002.1; note = Massilia rubra
gctgaggttgccgtctacatccatttagtcaccgcctgtgctgttcggcaggcaggggaccggattcccgcgtcccttaaaagaaactcacgctttacggaacctttgagcctcgctcagaggcttcgctgtggatgtcttgctcatgagcgagtctcaaaccctccatgaatgtcaacaagtgtaaatgaatgacacactggcaatctcagc

SEQ ID NO: 15565 - RNA, 213 nt, unidentified
  source 1..213: mol_type = other RNA; note = Related to NZ_WKJJ01000024.1; note = Massilia rivuli
gctgagattgccgtcaaaatccatttagtcacggcctatgctgttggtaggcagggggccggattcccgcgccccttgagaggaacttacgctttacggaacctttgagcctcgctcaaaggcttcgcggtggatgtctggcgaatgagcgaggctcaaatcctccatggaatgtcaacaaatgtaaatgaatgagtaattggcaatctcagc

SEQ ID NO: 15566 - RNA, 224 nt, unidentified
  source 1..224: mol_type = other RNA; note = Related to JAAUUP010000100.1; note = Deltaproteobacteria bacterium
ggtgcaggcgaccacgccacgactagcggctctccggagcgggatacacttctgtgttcccaggcaacgcggattgctgcgttgctttgataaatcaagcgcttgtaaggcctccggcccgatcgacgcccgcgagctcctcgcagccttggcgcttggcgccgatcgagcccgagctaacgctcggtcgacgtagggggtagttgtggcgtggtcaccgcacc

SEQ ID NO: 15567 - RNA, 214 nt, unidentified
  source 1..214: mol_type = other RNA; note = Related to JAIUHI010000001.1; note = Mesorhizobium sp.
gttgagggctcggtgagggagtttagaaatgcgccgcgcaagcggcgacgggttcctggggaacctggggctagggatttcccgggtccatacatcggagcaggaccttcgcgctgcgcgagacagcaagtcacggctggcggagtcttggacgagacttgctatcccacccacctgagtgggtcgaagtagatgtccgcaccgagccctcaac

SEQ ID NO: 15568 - RNA, 214 nt, unidentified
  source 1..214: mol_type = other RNA; note = Related to JAAYVT010000069.1; note = Phyllobacteriaceae bacterium
gttgagggcccggtgaagagatttagaaatgcgccgcgcaagcggcgatgggttccgtgggaacccagggccagggatttcccgggtccgtgcatcggagcaggaccttcgcgctgcgcgagacaacaactctcgactggcggggtcttggacgagacttgctgtcccacccacctgagtgggtcgaagtagatgtctacgccgagccctcaac

SEQ ID NO: 15569 - RNA, 214 nt, unidentified
  source 1..214: mol_type = other RNA; note = Related to NZ_VCDI01000012.1; note = Lichenicoccus roseus
gttgagggcccggtgagggcatttagaaatgcgccgcgcaagcggcgtctggtcccttggggacctggggcttgggattccctgagcccgcgcatcggagcaggaccttcgcgctgcgcgagacagcaagtctcggctggcggagtcttggacgagacttgctgtcccacccaccccggtgggccgaagtagatggcagcgccaagccctcaac

SEQ ID NO: 15570 - RNA, 214 nt, unidentified
  source 1..214: mol_type = other RNA; note = Related to NZ_CP010954.1; note = Sphingobium sp.
gttgagggctcggtgacagcatttagaaatgcgccgtgcaagcggcgacggttccctcggggagccggggtccaggatttccggggtccacacattggagcaggaccttcgcactgcgtgagacagcgagtctctgcgggcggggtcttggttgatactcgctgtcccacccaccatggtgggtcgaagtagatgcctgttccgagtcctcaac

SEQ ID NO: 15571 - RNA, 214 nt, unidentified
  source 1..214: mol_type = other RNA; note = Related to NZ_BAJW01000019.1; note = Acetobacter persici
gttgagggcccggtgacgccatttagaaatgcgccgtgcaagcggcgactgatcccttggggatctgggactccggattcccggagttcgcacatcggagcaggaccttcgcactgcgtgagacagcaagtctcggctggcggggtcttggttgagacttgctgtcccacccacctcggtgggtcgaagtagatgccagtgccgagtcctcaac

SEQ ID NO: 15572 - RNA, 214 nt, unidentified
  source 1..214: mol_type = other RNA; note = Related to NZ_SLXP01000012.1; note = Rhodovulum marinum
gttgagggctcgatgacgtggtctagaaatgcgctgcttcggcagcgacgggtcccttgggggcctggaacgtcggatttccgacgttcgcaaagaggagcggagtattcacgctgcgcgatactgcacgtcacgcctggcggtgtcttggccgcgacgcgcagtaccacccacccgggtgggtcaaagtagatgccggcgccgaaccctcaac

SEQ ID NO: 15573 - RNA, 214 nt, unidentified
  source 1..214: mol_type = other RNA; note = Related to JACIJP010000010.1; note = Sphingobium subterraneum
gctgagggctcggtgagggggtctagtaatgcgccgcttcggcggcgactggtccttttgggacttggggcatcggactaccggtgctcgttagaaggagcggaatattcacgctgcgcgatgctgcgaataacgcctggcgaagtcttggccgatatccgcagtatcacccacctgggtgggtcaaagtaggtgtcgttgccgagctctcagc

SEQ ID NO: 15574 - RNA, 214 nt, unidentified
  source 1..214: mol_type = other RNA; note = Related to JFYY01000007.1; note = Sphingomonas paucimobilis
gctgagggctcggtgagcgggtctaggaatgcgccgcttcggcggcgacgggtccttttgggatctggggcgctggattaccggcgtccgctaggcggagcgaagtattcacgctgcgcgataatgcacgtcgtgcctggcgaagtcttggtcgcgacgcgcattaccccccacccgggtgggtcaaagtagacgatgccgccgggtcctcagc

SEQ ID NO: 15575 - RNA, 214 nt, unidentified
  source 1..214: mol_type = other RNA; note = Related to NZ_JACONT010000017.1; note = Sphingomonas albertensis
gctgaggagtcggtgaggccggctaggaatgcgccgcgcgagcggcgactggtcctcttgggatctggagcgtcggatttccggcgttcgaaaagtggagctgggccttcgcgctgcgcgagactgcacgtcacgccggtcggggccttggttgcgacgcgcagtcccaccccccggggtgggtcgaagtagatgcccgcgccggctcctcagc

SEQ ID NO: 15576 - RNA, 213 nt, unidentified
  source 1..213: mol_type = other RNA; note = Related to NZ_BPQL01000193.1; note = Methylobacterium goesingense
gctgagggatcggtgattctatctaggaatgcgtcgcggaagcgacgacggttcttgaaggaactggagcgccggatttcaggtgctcggaaagcggagcgtccctattacgctgcgcgttacagcaagcatcacctcgcgccgtcttgggcgatgctcgctgtttcacccacccaagtgggccaaagtagatgaacttaccgaaccctcagc

SEQ ID NO: 15577 - RNA, 214 nt, unidentified
  source 1..214: mol_type = other RNA; note = Related to NZ_CP030037.1; note = Bradyrhizobium sp.
gctgagggcccggtgagggcgtctaggaatgcgccgcgagagcggcgacgggctcctcgggggcctggggcaggggatttcccatgtccgcaaagcggagcgttatcttcgcgctgcgcgttactacgagacacgcctggcggcgtcttggtcgagcctcgtagtatcacccaccatggtgggtcgaagtaggtgtccctactgagctctcagc

SEQ ID NO: 15578 - RNA, 213 nt, unidentified
  source 1..213: mol_type = other RNA; note = Related to FNXB01000037.1; note = Rhizobium tibeticum
gctgagggctccatgagggtgattaggaatgcgccgcgaaagcggcgatgggcatcacggatgtccagagtaccggattctcgatgctcgtctcgcgtagcgacattttcatgctgcgcaatggcacgagcctttcccggcggcgtcttgggggcgcctcgtgccattacccaccgaatggggtcaaagtaatgcaatcgtggagccctcagc

SEQ ID NO: 15579 - RNA, 213 nt, unidentified
  source 1..213: mol_type = other RNA; note = Related to RPNF01000004.1; note = Sinorhizobium meliloti
gctgagggctccatgagggtgattaggaatgcgccgcggaagcggcgatgggcatcctggatgtccagagcatcggattctcgatgctcgtctcgcgtagcgacattttcatgctgcgcaatggcacgagcctttcccggcggcgtcttgggggcgcctcgtgccattacccaccgtatggggtcaaagtaatgcaatcgtggaaccctcagc

SEQ ID NO: 15580 - RNA, 216 nt, unidentified
  source 1..216: mol_type = other RNA; note = Related to LXKM01000017.1; note = Agrobacterium sp.
gctgagggccccatgacagtagttaggaatgcgccgcgaaagcggcgatgggcgtcgttgtggatgcctagggtatcggattctcggtactcgtctcgcgtagctactttttcatgctgcgcaatactgcgagccttgcctggcggtgtcttggttgcgcctcgcagtattacccaccgatttgggtcaaagtaatgcagtcgtggagccctcagc

SEQ ID NO: 15581 - RNA, 213 nt, unidentified
  source 1..213: mol_type = other RNA; note = Related to NZ_QJKM01000019.1; note = Rhizobium terrae
gctgagggctccatgacagcgattaggaatgcgccgcggaagcggcgatgggcaccacgggtgtccagagcatcggattctcgatgctcgcttcacgtagcttgtttttcatgctgcgcactggcacgagcctttaccggcggcgtcttaggtacgcctcgcgccagtacccaccgaatggggtcaaagtaatgcaagcatggagccctcagc

SEQ ID NO: 15582 - RNA, 217 nt, unidentified
  source 1..217: mol_type = other RNA; note = Related to PEGF01000002.1; note = Caulobacter sp.
gctgagggttccttgagggcaattaggaatgcgccgcgaaagcggcgatgggcttcttcgcggaagcctagggcgtcggattctcggcgctcgtctcgcgtagctctcttttcatgctgcgcaatactgcaagcctttcctggcggtgtcttgggtgcgccttgcagtattacccaccggagtgggtcgaagtaagtgtcgtcctggaaccctcagc

SEQ ID NO: 15583 - RNA, 216 nt, unidentified
  source 1..216: mol_type = other RNA; note = Related to NZ_NEFY01000006.1; note = Marinobacter vinifirmus
gctgagggctctatgaaagagattagatatttgccacgaaagtggcaaggggttccttctgcggagcccagggtatgggagttcctgtgctcagatcgcggagcagtcttttcatgctgcgcttcagtgcgatctagcccgggcgatgtcttagggctagatcgcactgatccccaccgaggtgggtcaaagtaatgtctttctggagtcctcagc

SEQ ID NO: 15584 - RNA, 216 nt, unidentified
  source 1..216: mol_type = other RNA; note = Related to NYXE01000056.1; note = Rheinheimera sp.
gctgaggacttcatgatcgagattagacatttgtcacgagagtggcaaggggttctgtttttgggaccctggatgcgggagttcctgcattcgtttcgcggagctgtattttcatgctgcgcattagtgcgcgttagcccaggcgacgtcttcaggctaacgcgcactaatccccaccgaggtgggtcaaagtaatgtcttcatggagttctcagc

SEQ ID NO: 15585 - RNA, 216 nt, unidentified
  source 1..216: mol_type = other RNA; note = Related to NZ_JACHOW010000011.1; note = Longimicrobium terrae
gctgagggctccatgaccgggattagtactgcgccgcgaaggcggcgctgggctttcatcgcaaagttcagggtgcgggagttcccgcacccatctcgcggagctctgtattcatgctgcgcagcagtccaactctggcctggcggggtcttggtccagactcgcactgtcacccacccggggtggtcaaagtaatgccggcatggaaccctcagc

SEQ ID NO: 15586 - RNA, 211 nt, unidentified
  source 1..211: mol_type = other RNA; note = Related to NBDP01000036.1; note = Bosea sp.
gttgagggctccgtagtgtcgtctagcaatgcaccgcgcaagcggtgccgggtttcacaacccgggatgcgggatttccggcattcgtcaaaaggagctgagccttcgcgctgcgcgaggcagcaagcaaaaccaggcggtgtcttgggccttgctcgctgtctcccccacctatgtgggccgaagtagatgcgcattacgagccctcaac

SEQ ID NO: 15587 - RNA, 211 nt, unidentified
  source 1..211: mol_type = other RNA; note = Related to RCIZ01000007.1; note = Mesorhizobium sp.
gttgagggctccgtagtgacgtctagcaatgcaccgcgagagtggtgccgggctttcgggcctggaatgcgggatttccggcattcgttaagcggagctgatccttcgcgctgcgcgaggcaacaagaaacaccggtcggtgtcttcggccttcctcgctgcctcccccacctatgtgggccaaagtagatgcgcattacgagccctcaac

SEQ ID NO: 15588 - RNA, 214 nt, unidentified
  source 1..214: mol_type = other RNA; note = Related to NZ_JAHVKC010000001.1; note = Pseudooceanicola nitratireducens
gttgagggcgccgtgaggccgtctaggaatgcactgcgcagccagtgctgggtctgttacgacccagggtgttggatttccggcgctcgtaaagcggagcaggttcttcgcgctgcgcggtatggcaagcaaagcctgtcggtgtctccggcagtccttgccataccccccaccttaggtgggccgaagtagatgcgccaaacgagccctcaac

SEQ ID NO: 15589 - RNA, 214 nt, unidentified
  source 1..214: mol_type = other RNA; note = Related to WIEL01000040.1; note = Rhizobium leguminosarum
gctgaggattccgtgatgtcatttagcatagcgccattaacgtggcgccgggtccacatgtttgggcccggggaatcggatttccgagaccctttgaaggagcgaagatttacgctgcgcgatcaccaaagcatcttgggcggtgtcttgggcgcttcttcggtgttcccccaccccgagtggtcaaagtagatggctcgctggaatcctcagc

SEQ ID NO: 15590 - RNA, 214 nt, unidentified
  source 1..214: mol_type = other RNA; note = Related to NZUJ01000046.1; note = Ponticaulis sp.
gttgagggctcggtgatacgatttagcatttcgtggcacttgccacggttggccctcgcgggcatggggaatgggatttcctgttctctgccagaagaacacacatatttcgcttcgcgtctgttgaaacacagagcggcgaagtcttactttgtgttccaacagtcacccaccacaggtgggacgaagtaaatgcgttttccgagccttcaac

SEQ ID NO: 15591 - RNA, 247 nt, unidentified
  source 1..247: mol_type = other RNA; note = Related to NZ_JABVZR010000001.1; note = Novosphingobium sp.
tctgagggttccacggtagcatctagctattgtcatccgagagggtgaccgtgatggtggatacgaatccattgtcgtggggaatggagttttccattgccgttgaaagagcacgtgaatgcaggtccacgccggatcatccatcattgcccttcgggcaacctcctcggaacggctcggtttgatggacgatccggcgccgccagggccgcgctaaagtagatggctcatccgtgggatcctcaga

SEQ ID NO: 15592 - RNA, 247 nt, unidentified
  source 1..247: mol_type = other RNA; note = Related to JAALZB010000008.1; note = Agrobacterium tumefaciens
tctgagggttccaaaaggtagcatctagctactgccacccgcaagggtggccaggatgatgagtacgaacttatcgtcatggggaatagggtttcttattgccgctgaaagagcacaagaatgcaggtccacgcaggatcatccatcattgccctttgggcaacctcctcggaggctcggtttgatggacgatcctgcgccgccagggccgcgctaaagtagatggctcaccgttgggaccctcaga

SEQ ID NO: 15593 - RNA, 245 nt, unidentified
  source 1..245: mol_type = other RNA; note = Related to VFSZ01000005.1; note = Mesorhizobium sp.
tctgagagtcccacgctagcgtctagctattgtcatccttcgggatggccgtgatgatggatacgaatccattgtcttggggaatggagttttccattgccgctgaaagagctcgtgaatgcaagtccacgtcgcgtcatccatcgttgcctttcaggcaacctcctcggaggctcatttcgacggacgacgcgacgccgccagggccgcgctaaagtagatgccgtatcgttgggactctcagg

SEQ ID NO: 15594 - RNA, 245 nt, unidentified
  source 1..245: mol_type = other RNA; note = Related to NZ_QDKO01000010.1; note = Caulobacter sp.
actgagggctccacggctcttgtttagcgcccgccgctcttcggagcggccgtgatggtcggtacgaaccggctatcgtgggtgatcgggtttccggtcgccgttgttagagctgccgatcgcaggtccacgtcgcttcctccttcgttcctttcaggaacctcctcgtgaggctcggttcgaaggacgaagcgacgccgccaggcctgggttcaagtagatgagacacccgtggagctctcagc

SEQ ID NO: 15595 - RNA, 244 nt, unidentified
  source 1..244: mol_type = other RNA; note = Related to PCOO01000001.1; note = Ochrobactrum sp.
gttgagagacccaagggtgtcatttagcaaccgccgcctcacgaggcggccaaggtgacccgctttggtgtaggtcgccttggcggcagggtttcctgtcgccgtagatggagctgtcgaatactggtatcctacccagcgcgtcagtcgcgagcgacacattcggcaagcgtcgaaatgaacccgctgggcaggacaccccacaggggtgtaaggtagatgctgcatccttgggactctcagg

SEQ ID NO: 15596 - RNA, 240 nt, unidentified
  source 1..240: mol_type = other RNA; note = Related to NZ_LMCH01000057.1; note = Pseudovibrio sp.
actgagagcttccaaggtgctatctagtacccaccgctcgaaagggcggtcatgacgattacttacactgatcgtctggggcactggggtttcccagcgccgtcgatggagcgcatgattgcacgtctctgggcaaagaaagcagtcccggagggacacagtcgtatgccttcattgcttcctttgcccaaagcacccgttccgggtgaaagtagatgaagcatccttgggactctcaga

SEQ ID NO: 15597 - RNA, 240 nt, unidentified
  source 1..240: mol_type = other RNA; note = Related to NZ_CP066786.1; note = Martelella lutilitoris
cctgagagcttccaaggtgccatctagtactcaccgttcgaaagagcggtcatgatggttacttacactaatcgtcaagggcactggggtttcccagcgccgtcgatggagcgcatgattgcacgtctctgggcaaagcaagcagtcccggagggacacagtcgtttgccttcattgcttcctttgcccacagcacccgtaccgggtgaaagtagatgaagcatccttgggactctcaaa

SEQ ID NO: 15598 - RNA, 234 nt, unidentified
  source 1..234: mol_type = other RNA; note = Related to JAEUMP010000012.1; note = Hyphomonadaceae bacterium
tctgagggttccgcggaggccacctagcgtacgccgtccttccgggcggccatgacgaccgaccgaagttggttgttagggccttggggcttcccttggccatgtcggagcatctgaagacaggttccgtatcatcatcgcgtccctacgggtccattcgaaggctcataagcgacgatgatgcgcatcctgcgccgggcaaaatgtagatgagccatccgtgggactctcaga

SEQ ID NO: 15599 - RNA, 226 nt, unidentified
  source 1..226: mol_type = other RNA; note = Related to VGDE01000018.1; note = Alphaproteobacteria bacterium
gttgagagttccaagaggcgggtctagcaatgccagtcgttgactggccaagatggggacacctgtcatgggcatctgggtttctgggcgccgctgagagagctgatgaataactgcacctatatgccagtccacgccggaggtacgttcgggagactcaccgtggaccggcatatagcccttcgggccgaactaaagtagacgatgcaagcttggaactctcaac

SEQ ID NO: 15600 - RNA, 247 nt, unidentified
  source 1..247: mol_type = other RNA; note = Related to JXQV01000002.1; note = Agrobacterium tumefaciens
tttgagagaaccaagggtgctcacatctagtgttcgccgctcttcggagcggccaagatgatgcgtccatgcgtatcgtcatgggtggtcgggtttccggccgccgttgaaagagctgatgattgtagtctgttgcctgtcgattccagtcgcaagcgacatcactcggtcaccggctcgtttggaaccgacaggcatcaccccatccggggcggaaggtagatgctgcatccttgggactctcagc

SEQ ID NO: 15601 - RNA, 247 nt, unidentified
  source 1..247: mol_type = other RNA; note = Related to NZ_JAHYCB010000008.1; note = Rhizobium populisoli
tctgagagaaccaagggtgctcgcatctagtgttcgccgctcttcggagcggccaagatgatgtgtgtatgcgcatcgtcgtgggtggccgggtttccggtcgccgttgaaagagctgatgattgtagtctgttgcctgtcgatcccagtcgcaagcgacatcactcggtcaccggctcgtttggaaccgacaggcatcaccccgtccggggcggaaggtagatgcggcacccttgggactctcaga

SEQ ID NO: 15602 - RNA, 258 nt, unidentified
  source 1..258: mol_type = other RNA; note = Related to NZ_LHZT01000085.1; note = Acetobacter tropicalis
gttgagggttccaaccgaggtctagataccggtctcgcaaagcgagaccaccgtcagtggtgggattttccgtcactaccggcttccgggtttcttgttgccgaggaaagagcttccgatcgcaggtcctggtcctgtgcgctcgcccccctttgggggggcgtttcgtagagggggtgtgtcgtatgactcactcgagcccacaggacccgcacatgtgcggagattaaaggtagatgctcagttggaaccctcaac

SEQ ID NO: 15603 - RNA, 217 nt, unidentified
  source 1..217: mol_type = other RNA; note = Related to JAAXBO010000012.1; note = Rhizobium leguminosarum
gttgcgaggttaatagtttgaacgagacgctcgtgctcacgagatcggtgacgggcctatggcctgttgggttaggattgccgaaacccgccggacgagccactgcaaagcctagcggctgtgtgagcgtttctagctcgtggcgaacgccttacggcgaaacgctcacgcaaacgcactgatcggccaaagtcgatgaattatttgacctcgcaac

SEQ ID NO: 15604 - RNA, 214 nt, unidentified
  source 1..214: mol_type = other RNA; note = Related to NZ_CP090091.1; note = Rhizobium leguminosarum
gttgcgaggatgatagtttgaacgagacgctcgtgctcacgagatcgacaggccacgcgcctgttgggttaggattgccgaagcccgtcggacgagccaccgcaaagcctagcggctacgtggacgtttcctgcccgcggcgaatgccttacggtgaaacgcccacgcaaacgcactgatcggctaaagtcgatgaactacataacctcgcaac

SEQ ID NO: 15605 - RNA, 214 nt, unidentified
  source 1..214: mol_type = other RNA; note = Related to NZ_CP092346.1; note = Rhizobium gallicum
gttgcgagggtgatagtttgaacgagacgctcgtgctcacgagatcgacaggcgaggagcctgttgggttaggattgccgaagcccgtcggacgagccactgcaaagcctagcggctgtgtgagcgtttctatatcgtggcgagagccttacgacgaaacgcccacgcaaacgcactgatcggccaaagtcgatgaattatctcacctcgcaac

SEQ ID NO: 15606 - RNA, 229 nt, unidentified
  source 1..229: mol_type = other RNA; note = Related to NZ_CP065229.1; note = Erythrobacter sp.
gctgcggggttaagcaggccacgagagaagctcgtgctcacgagagcgattggacggtcgccgcaaggaaccgttcaattgggttaggattgccgaagccctacggtcgagccaccgcccagccattcggctgggcacgcatcggcttaacgcccgagcgccgggctaccgacgcgtgcccagacgaacccattcgggtcaaagtcgatgtccagtttctctccgcagc

SEQ ID NO: 15607 - RNA, 229 nt, unidentified
  source 1..229: mol_type = other RNA; note = Related to NZ_CP016461.1; note = Blastomonas sp.
gttgcggggttaagcagggccacgagagatgctcgtggtcacgagagcgattggacggtgccgcaaggggccgttcaattgggttaggattgccgaagccctacgatcgagccaccgcccagccattcggctgggcacgcatcgtcttaacgcccgaacgccgggctaacgacgcgtgcccagacgaacccattcgggtcaaagtcgatgcccagtttttccccgcagc

SEQ ID NO: 15608 - RNA, 237 nt, Pseudomonas sp.
  source 1..237: mol_type = other RNA; note = Related to NZ_JACAQV010000005.1; note = Pseudomonas salomonii
gctgagagcgccagactgacgtttctagtgttggtacggcgacgtacccggtatcagatgatgatgcaatgggggacatactttgtccttttcggagtagcatgcgcttaagtgtaagtatcaacccgccttcgcaattgcgaaagtgcatgctcggtcgcaagctcgcctcgcctctcggcgggctgattctcacccttcgggtgtcaaagtagatgtcagtctggcgcgctcagc

SEQ ID NO: 15609 - RNA, 237 nt, Pseudomonas sp.
  source 1..237: mol_type = other RNA; note = Related to NZ_UWGW01000546.1; note = Pseudomonas viridiflava
gctgagagcgccagactgacgtttctagtgttggtacggcgacgtacccggtatcagatgatgatgcaatgggggacatactttgtccttttcggagtagcatgcgcttaagtgtaagcatcaacccgccttcgcaattgcgaaagtgcatgctcggtcgcaagctcgcctcgcctctcggcgggctgattctcacccttcgggtgtcaaagtagatgtcagtctggcgcgctcagc

SEQ ID NO: 15610 - RNA, 231 nt, Pseudomonas sp.
  source 1..231: mol_type = other RNA; note = Related to NZ_CM001559.1; note = Pseudomonas chlororaphis
gctgagagcgccagactgacgtttctagtgttggtacggcaacgtacccggtatcagagatgatgcatttgggggacatattttgtcccttacggagtagcatgcgcttaagtgtaagcatcaacccaccttcgcaaaagcgtatgctcggtcgcaagctcgcctcgcagctcggcgggttgattctcacccttcgggtgtcaaagtagatgtcagtctggcgccctcagc

SEQ ID NO: 15611 - RNA, 227 nt, Pseudomonas sp.
  source 1..227: mol_type = other RNA; note = Related to NZ_UWJA01000102.1; note = Pseudomonas viridiflava
gctgagggcgccggattgattcttctagattggtatggcgacatacccggtatctgatgatgcataggaggacatattttgtcctttacggagtagcatgcgcttaaagtgtaagcatcaacgcaccttcgcccataggccactcggtcgcaggctcgcctcgctgctcggcgcgctgattctcacccttcgggtgtcaaagtagatgacagtttggcgtcctcagc

SEQ ID NO: 15612 - RNA, 236 nt, Pseudomonas sp.
  source 1..236: mol_type = other RNA; note = Related to NZ_CP077076.1; note = Pseudomonas fakonensis
gctgaggtagccagattgttccatctagaatggcgtggtgacacgcccggtatcaactgatgatgatgctattgaggacatattttgtccttttcggagtagcgtgcgcataagtgtaagcatcagcgcaccttcgcccactgagggcccctcggtcgcaagctcgcctcgatgctcaggcgcgctgtttctcaccctgcgggtgtcaaagtagatggcaatctggcgacctcagc

SEQ ID NO: 15613 - RNA, 229 nt, Pseudomonas sp.
  source 1..229: mol_type = other RNA; note = Related to NZ_FOTU01000001.1; note = Pseudomonas syringae
gttgaggtagccagattgatctatctagcatggcatggtgacatgcccggtatcagtgatgatgctatggaggacatattttgtccttttcggagtagcgtgcgcttaagtgtaagcatcagcgcaccttcgcccacaggccactcggtcgcaggctcgcctcgttgctcaggcgcgctgtttctcacccttcgggtgtcaaagtagatggcaatctggcgtcctcaac

SEQ ID NO: 15614 - RNA, 229 nt, Pseudomonas sp.
  source 1..229: mol_type = other RNA; note = Related to NZ_UUET01000191.1; note = Pseudomonas viridiflava
gctgaggatgccagactgacctatctagaattgcacggtgacgtgcacggtatcatcgatgattctacggggggcatattttgtccttttcggagtagcttgcgcttaaagtgtaagcagcagcgcaccttcgaccgcaggccactcggtcgcaagctcgcctcgtttctcggcgcgctgcttctcacccttcgggtgtcaaagtagatggtggtctggcgttctcagc

SEQ ID NO: 15615 - RNA, 230 nt, unidentified
  source 1..230: mol_type = other RNA; note = Related to NZ_LPFA01000028.1; note = Burkholderia cepacia
gctgagggcgtcggattagccatctagtgatggcatggcaacatgcccggcgactgcccttcggggcggccatgggacacatattttgtgctccttcgacgcagcaggcgcaaacgtgtaagcatcgtcgcgatccgctacgctgtgtacctctgcgctcgtcttgctgcgaaccgcgacgatcctcacccttcgggtgtcaaagtagatggctatctggcgcgctcagc

SEQ ID NO: 15616 - RNA, 221 nt, unidentified
  source 1..221: mol_type = other RNA; note = Related to PBYJ01000011.1; note = Oceanospirillaceae bacterium
gctgaaggcgccagtgagctccatctagcattgcatggaaacatgcacaaaggctgttgatgtaagaacagtcggggacgcatattttgcgatcctttgatgtagcagacgctaatgtgtaagcatggtcgcgattcggcggccgctacgaggtcttgctgcgaaccgcgaccatcctcaccccaaggggtcaaagtagatgaatcactggcgccctcagc

SEQ ID NO: 15617 - RNA, 240 nt, Escherichia coli
  source 1..240: mol_type = other RNA; note = Related to CP059835.1
gttgaggaggccataatgtttcatttagcgttaacacaagtaactaccattacttgtcaggagaagtgtatacctttcctgcgggccatatattttatgtgctcatgtattagcactcgcaatagtgtaagcaaaatcacgacgatcccgacttcgtcggctcgatcgtggtctttcttatcgccgcgattttacttaccccttcggggtcaaagtaaatgaaacaatggtctcctcagc

SEQ ID NO: 15618 - RNA, 240 nt, unidentified
  source 1..240: mol_type = other RNA; note = Related to NZ_CP011118.1; note = Yersinia enterocolitica
gttgaggaggccataatgtttcatttagcgataacacaagtaacttgcattacttgtcagaagaagcatatgcctctcctgcgggccatatattttatgtgctcatgtattagcactcgcaatggcgtaagcaaaatcacgacgatcccgacttcgtcggttcgatcgcggtctttcttatcgtcgcgattttacttacccctccggggccaaagtaaatgaaacaatggtctcctcagc

SEQ ID NO: 15619 - RNA, 243 nt, Acinetobacter sp.
  source 1..243: mol_type = other RNA; note = Related to CP018254.1; note = Acinetobacter baumannii
gttgaggagaccataatgtttcatttagcgttcgctcaagtaactattacagttacttgtctgattagttttaaactcaatcagtcggctatattctatataagcccaagtaatagctctcgcaaaagagtaaccaagatcacgacaatagcgactaaagtcgctcgattgtgtcctcacttattgtcgcgatcttacttacccctccggggccaaagtaaatgaaatcatggtctcctcagc

SEQ ID NO: 15620 - RNA, 246 nt, unidentified
  source 1..246: mol_type = other RNA; note = Related to NZ_PUJU01000037.1; note = Photorhabdus tasmaniensis
gttgagaggaccatcataatgttttatttagcgtcttcacaagtgacaccattcacttgtccagtaactacaaagtgtaaactgggggccgtatactttacgtgctcatggaatagctctcgcattagtgtaagcgggatcgacgcaataccgacgatgtcgggtgaaacgcagacttatctattgcgccgatccccctcaccccttcggggccaaagtaaatgagacaacggtggtcccctcaac

SEQ ID NO: 15621 - RNA, 209 nt, Vibrio sp.
  source 1..209: mol_type = other RNA; note = Related to NZ_CP073273.1; note = Vibrio fluvialis
gctgagggcgtcagattagatctagcgttgtaaacttaaacagtttacggggaagcatattttgcaaccttcggagcagcagaggcaaagtggagcgttgaggcatttacttcgcggccactcgtagactcgttgcgaataaaatacctcaatgctccctatcaagagcgaaaagtagaagtagatgaataatatttggcgtcctcagt

SEQ ID NO: 15622 - RNA, 212 nt, unidentified
  source 1..212: mol_type = other RNA; note = Related to JACFTX010000002.1; note = Photobacterium damselae
tctgagggagccatattaaatctagcattcgtaaaccactatatttatggtttactgggaagcatattttgcaaccttaggaaaagcaggggctatcgtggagcgttgtgtgatttttttcgcatttgctcgtagcctcgccctcaaaaatcacataaagctccagatcaagagcgaaaagtaagagtagatgaataattggcgccctcagc

SEQ ID NO: 15623 - RNA, 325 nt, unidentified
  source 1..325: mol_type = other RNA; note = Related to NZ_KE383828.1; note = Oceanospirillum beijerinckii
gctgagggttccagtttgagttttctagcattagtgccaacaggcatctaagtagtcatacaaaagtttttcggcactattgtctctacccttataaaccaccggatggtgaaggtggaaaacttatgtaagactgcttattaagtgatcaaggatgtttgcttagtttaatggtcgcatattttgcgtaccttagtaatagcagacgcatagtgtcagtatagtcgcgattcaacggtctctcgtgcttcgcgcctcaatgctgaaccgcgactattctaacccaagggttaaaagtagatgtacaaaaactggaatcctcagc

SEQ ID NO: 15624 - RNA, 208 nt, unidentified
  source 1..208: mol_type = other RNA; note = Related to NZ_CH672406.1; note = Idiomarina baltica
tttgggagctcctctctattaatctagcgaatacaggctgttagcctgtcaattttgaggagcatgttgttttctcattgagcgagccgccgcttagagtctaagtgagactcacagccacctaaaggctgtggtcgtcgactctctgctgcgagtctcatttaccctccttacggataaaagtagatgaatagatggagctcccgag

SEQ ID NO: 15625 - RNA, 260 nt, unidentified
  source 1..260: mol_type = other RNA; note = Related to NZ_AKKU01000003.1; note = Alishewanella agri
actgagagctctaaatggagtttagcttgaaccaatgtaaaatgcattcgtctgtagaccaatgtgttaagcatttctctcataattttattatgagtagaggggagtcagagtctgtcctccttggaaatagcatccgattgatgctaagcatgaccacgcaattccgactgcgtcggatggcgtcgaggccttgcctaatcgcgcggtcctcctcaccctgcgggtgtcgaagtaaatgaacagatggagctctcagt

SEQ ID NO: 15626 - RNA, 219 nt, unidentified
  source 1..219: mol_type = other RNA; note = Related to NZ_LCTG01000001.1; note = Gluconobacter oxydans
attgagagtctcgtgagggtatttagctcctgcgcaagcaggcgtgatgctgggcatccctgtccggtgttaccggcgtttgtatttcgagcgctgccgaatgagcctccgcataggccttatcgctcgtcctccgcttgggctgcgatgggcttgctgcggagtacgaacgacaagtccatggtcctagagggtaaatgactttgtgggactctcaag

SEQ ID NO: 15627 - RNA, 220 nt, unidentified
  source 1..220: mol_type = other RNA; note = Related to NZ_JSXI01000043.1; note = Sphingomonas sp.
gctgagagtctcatgaggacgtttagttcctgcgaaagcaggcgtgatgccgggcatccctgtccggcgtcaccggcgaccgtatttcggtcgctgacgagcgagcctccgcataggccttatcggtcacgctccgctcggggctgcgataggcttgccgcggagcgcgaccgaccagtccatgatcctagagggtagatgaccttgtgggactctcaaa

SEQ ID NO: 15628 - RNA, 236 nt, unidentified
  source 1..236: mol_type = other RNA; note = Related to JAFKFG010000027.1; note = Alphaproteobacteria bacterium
gctgaggattccttgatttgtaactagcacccttcccaaccgaaaggcggaagggcagtgttgggtggcatccctgtcatcctactgtggcgcttgtgtttcgggcgctttctgattgagcgtaagcaaaaagccttgtttgtcttcgctagactcgcatcgcacggctcgcggtcgagcgaagacaatcaacgccatgaacagacgaaggtagatgcaaaattggaattctcagc

SEQ ID NO: 15629 - RNA, 232 nt, unidentified
  source 1..232: mol_type = other RNA; note = Related to JABMRO010000623.1; note = Planctomycetes bacterium
attaaggaactcagcgagttcatttagttcaggttccctgggaagggaactaccatgactataggcttatcgcttattgttatggggaaactggattaccagttttctcggttaaagcgtgcgcatgtcactaaggttgtgcacgctacggctttctctacgtgcggcttgaggcgcagcgtgcacagcctcacttcgtggaggtcaaagtaaatgaatcgctgggttccac

SEQ ID NO: 15630 - RNA, 237 nt, unidentified
  source 1..237: mol_type = other RNA; note = Related to NZ_FNIN01000001.1; note = Desulfonauticus submarinus
attgaggggattaactgctttatctagtaaaactacctctttggaaaatggaggtagaaatgactgttaatttaacggtctggggatttggattaccaaatctctgtagaaaagcgggtgcttgcggactaaggcatgatgttgtgccgccttcggccgctcgatgtctcgctttgtcacaacatcatatcttacctctcaggaggtcaaagtagatgaagcgttggtcccctcatt

SEQ ID NO: 15631 - RNA, 264 nt, unidentified
  source 1..264: mol_type = other RNA; note = Related to JAGRCJ010000081.1; note = Caldilineaceae bacterium
gaggagtgttcgatagcaattttatctagtgtatgtcgacggcctttgccatcgaccccgtaaaaccgtgctgatttactagcctggtttggacaacaaaatattgttgtcttggtgaaagctcaggtttgtgctaaggcttgcgcgcactgcttcttccagcgatgtctcggcgcagtacgcgcattcctcgcatttgctggttaaaagatttagcaatatgcgatcaaaggaagtagataaatatgtcaatcggacctcctc

SEQ ID NO: 15632 - RNA, 209 nt, unidentified
  source 1..209: mol_type = other RNA; note = Related to VTRK01000013.1; note = Comamonas thiooxydans
gttgagggaccgcaacgttggttagcgtttacctaggccattgttttcagcggcattggttggggcgcggatttcagctgccctttgaactagcccacgctttggcggatgcaagaggcgactctttcatccgtcgatgcctcgggtcagactcgcctctcccctccgccctgcggagtcaaagtagctaatgatgtggtcctctcaac

SEQ ID NO: 15633 - RNA, 209 nt, unidentified
  source 1..209: mol_type = other RNA; note = Related to NZ_CP049990.1; note = Pusillimonas sp.
gttgagggaccgcagtgttggttagcgtttaccttggcctatgttttcagcggcatgggttggggcgcggattgccgctgccctctggaatagcccaagctttggcggatgttagaggcgactcttccatccttcggagcctcgggtcagactcgcctctcacttccgctctgcgtaattgaagtagctgacaatgtggtcttctcaac

SEQ ID NO: 15634 - RNA, 212 nt, unidentified
  source 1..212: mol_type = other RNA; note = Related to JAKZFD010000012.1; note = Pelomonas sp.
gttgagagggcgcaccgttggctagcgttgacctggacctgtgttttcagcggcacaggttggggcgcggatttccgttgccctctgaagttgcccaggctatggcggatgcaagacgcgagtcatccatcctacgaagcctcgggtcagactcgcgtctcccctccgccggtcgtcggagtaaaagtagctaacgatgtggtcctctcaac

SEQ ID NO: 15635 - RNA, 212 nt, unidentified
  source 1..212: mol_type = other RNA; note = Related to NZ_CP028294.1; note = Acidovorax avenae
gttgaggggccgcattgctggctagcgttgacctaggcctgtgttttaagcggcactggttggggctcggaattccgcagctctatgaaattgcccaagctttggcggatgtaagacgcgagtgcttcatccttcggagtctcgggtcagactcgcgtctctcctccgcctgtcgtcggagtaaaagtagctagcaatgtggtcctctcaac

SEQ ID NO: 15636 - RNA, 234 nt, unidentified
  source 1..234: mol_type = other RNA; note = Related to JACEZU010000002.1; note = Duganella sp.
gttgaggagccacagcgagagttagtgtttaccacgtgccataccttcgggtgcaggcatgtacctttgccttcgggtttagggtggtggcggattccgcttcccattgaagtagcctacgcattgacggatgcgtagcacgactatccccgcgtcgcggactccgggttttagccgcgctacgcacccccgtacaaaacttaacgagagtaatcttaatgtggtctcctcgac

SEQ ID NO: 15637 - RNA, 204 nt, unidentified
  source 1..204: mol_type = other RNA; note = Related to NZ_JACHHM010000011.1; note = Parapusillimonas granuli
gttgaagagccacggcaatggttagtgcttacctagacctgtgttttcggcattggttgggacgcggatttccgccgtcctctgatccagctctcgcactggcgaaattacacaccagtcctcctatccttcggggcctcgggtccgactggcgtgtacctccgcaagcggagtcgaagtagcttatgccgtggtctcctcaac

SEQ ID NO: 15638 - RNA, 203 nt, unidentified
  source 1..203: mol_type = other RNA; note = Related to SEEN01000026.1; note = Hyphomicrobiales bacterium
gttgagggaccacggtcatggttagtgcttacctagacccgtgtttacggcattggttgggacgcggatttccgccgttctttgatccagctctcgcactggcgaaattacgcaccagtcctcccatccttcggggcctcggggctgactggcgcgtacctccgcaagcggagtcgaagtaactatgctgtggtctcctcaac

SEQ ID NO: 15639 - RNA, 221 nt, Pseudomonas sp.
  source 1..221: mol_type = other RNA; note = Related to RKKU01000049.1; note = Pseudomonas neustonica
gttgagaagatcacgttgaaggttagtgttcaccggagcaaccggagcgagcttgactcgtccattgctgctgtgggggcgcggagttccgctgcctttcgtagaagctttcgcaaggcggatgtcgagcacgactcaaccaacctgcggaagacttggggtggagccgcgctcggcttccactttcgtgtcaaagtagcctgacatgtggtcttctcaac

SEQ ID NO: 15640 - RNA, 230 nt, Pseudomonas sp.; identical to SEQ ID NO: 15499
  source 1..230: mol_type = other RNA; note = Related to NZ_CP018420.1; note = Pseudomonas veronii

SEQ ID NO: 15641 - RNA, 221 nt, unidentified
  source 1..221: mol_type = other RNA; note = Related to PFJY01000128.1; note = Hydrogenophilales bacterium CG_4_10_14_3_um_filter_58_23
gttgagaagccaccttgttagttagtgtttaccggagcatgttgatcaggcctagcttgtatagcttgcttttgttggggtgcggagttccgctacccttcgtagaagcctacgcattgcggatgttgagcacgactcaactctcctgcggaggacttggggctgagccgtgctcagcgtccacagtcgtgtcgaagtaactgatatgtggtcttctcaac

SEQ ID NO: 15642 - RNA, 252 nt, unidentified
  source 1..252: mol_type = other RNA; note = Related to CP021181.1; note = Rhizorhabdus wittichii
gttgagggctcctgtggagtcgcatagttgacgtcgccgcatcggctttgctggtgtttcgacggcaacatatggtcttcgggtcatatgtttcggggcgcagaatctgctgctctcaggacaagcctccgctcgatgctaaggcatatcgcgcaacgccgcttacagcggatcgcgtcggtgtctagctacgtcgcgcgatatgtctcacccccagggtgtcaaagtacgtgacttcttggagccctcaac

SEQ ID NO: 15643 - RNA, 221 nt, unidentified
  source 1..221: mol_type = other RNA; note = Related to SECT01000232.1; note = Oxalobacteraceae bacterium
gttgagggggccagatcgaggctagtgcgtgcccgggagggtacatagacgcttgcacaacaggcttgcgttgggacgcggattgccgttgttctgagaagaagccggcgcttgacaggaggttgcatacgacttccatttacgagcgcttgtctcctagaaagccgcatgcatccgcctgcggcggatatcgaagtagtcctcaatgtggtctcctcaac

SEQ ID NO: 15644 - RNA, 221 nt, unidentified
  source 1..221: mol_type = other RNA; note = Related to NGUN01000003.1; note = Sphingobium sp.
gttgaggggaccaccttgaggctagtgcgcgtccatttggacgcatagacacttgctcaacaggcttgtgtcggggcgcggatttcagttgccctaagaataagccggcgcttgacaggaggttgcatgcgaccttctttcacgagcgcttgtctcctagaaggccgcatgcatccgcctgcggcggatatcgaagtagtcctgaatgtggtctcctcaac

SEQ ID NO: 15645 - RNA, 221 nt, unidentified
  source 1..221: mol_type = other RNA; note = Related to QFNB01000026.1; note = Pelagerythrobacter marensis
gttgagggggccatcttgaggctagtgcgcgtccgcgaggacgtattaacgcttgctcaactggcttgcgttggggcgcggattaccgttgctctaagaaaaagcttgcgcttgacaggaggttgcatgcgacttccctttacgagcgcacgcctcctagaaagccgcatgcatccgcctgcggcggatatcaaagtagtcctcgatgtggtctcctcaac

SEQ ID NO: 15646 - RNA, 219 nt, unidentified
  source 1..219: mol_type = other RNA; note = Related to JAEMRT010000003.1; note = Sphingopyxis sp.
gttgagggggccaccttgaggctagtgcgcgtccgcaagggcgcatagacgctgctcaaacggctgcgttggggctcggaattccgttgctctcagatcaagcccgcgcgtgacaggaggttgcatacgacttcccttcacgagcgcaagtctcctagaaagccgcatgcatccgcctgcggcggacaccgaagtagtcctttatgtggtctcctcaac

SEQ ID NO: 15647 - RNA, 220 nt, unidentified
  source 1..220: mol_type = other RNA; note = Related to NZ_JACRVS010000011.1; note = Acetobacter sp.
gttgaggggcccaccgggaggctagtgcgcgtccgcaaggacgcattgacgtatgctcaacggcatgcgttggggcgcggatttccgctgccctcagaacaagtccgcgcttgacaggaggttgcatgcgacctctctaatcgagcgcatgtctccggataggccgcatgcatccgcctgcggcggatatcaaagtagtcctctatgtggtctcctcaac

SEQ ID NO: 15648 - RNA, 225 nt, unidentified
  source 1..225: mol_type = other RNA; note = Related to NZ_SCNH01000027.1; note = Sphingomonas sp.
gttgggggggccacatggaggctagtgcgcgccgtctcatttggcggtgcatagacgggtatccagctgtatccgttggggcgcggattaccgttgctcttagaacaagtccacgcttggcaggaggttgcgtacggcttctccgcgagcgtgagccttcgggttcagccgcacgcatccgcctgcggcggagatcaaagtagtcctccatgtggtctcctcaac

SEQ ID NO: 15649 - RNA, 224 nt, unidentified
  source 1..224: mol_type = other RNA; note = Related to NZ_CP013949.1; note = Bradyrhizobium sp.
gttgagaggatcggggcatggttagtgcgtgcctgacgcaggtcaggcacctaggcagttgtaagctgtaactgctggggctcggactaccgcagccctgtgagcaagctgacgctaggcagtcgattaaagggaaagcctgtttcccatcgtgcgcctcgcgtcggctctccctttattcacctacggtgaagtcaaagtaactatgtcttggtcttctcaac

SEQ ID NO: 15650 - RNA, 221 nt, unidentified
  source 1..221: mol_type = other RNA; note = Related to CP090554.1; note = Neorhizobium galegae
gttgaggagacccgctcatggttagtgcgggccatctgaagaggtggtccatagacggctattactgtagtcgttggggcgcggattaccgctgctctaagaacaagcctaggcttgacaggaggtcgcgaacgcctcttttctccatcgcgcgcctcggggcgagccgtccgcggccgcctgcggcggcatcgaagtagctatggcgtggtcttctcaac

SEQ ID NO: 15651 - RNA, 242 nt, Citrobacter sp.
  source 1..242: mol_type = other RNA; note = Related to DACSWP010000009.1; note = Citrobacter freundii
actgagaaggactacatatgactagtgtcagcaagcaactctccatcttacctattggcttgattgagaattgctacatcattttgatgttggggtagggacttcctgagccttatgaaatagccctcgcttggctggagacggcgcactctgccttttccagcgtaagccttgggtcaccagagcgcgccgtcgcctgcggcgacatacgcatcggagtagttgtatgtggtcctctcata

SEQ ID NO: 15652 - RNA, 244 nt, unidentified
  source 1..244: mol_type = other RNA; note = Related to CP068391.1; note = Serratia proteamaculans
actgagagcgactacgtatgactagtgctaacgagcaatacaaagtcacccccttggggatgatagagggttgctacaccactttacagtgggtgttggggtatggatttcctgaacctcacgaaaaagcccacgcttggctggagacggcgcactctgcctccgccagcgtaagtcttgggttaccagagcgcgccgtcgcctgcggcgacgcatcggagtagttatatgtggtcctctcaat

SEQ ID NO: 15653 - RNA, 244 nt, Aeromonas sp.
  source 1..244: mol_type = other RNA; note = Related to NKWH01000001.1; note = Aeromonas veronii
actgagagagaccacatatgactagtgttaacgagcaacacaaagcctttccaatcggatcggtggaggtttgctacaccactttacagtggatgttggggtacggatttcctgagcctcatgaaaaagccctcgcttggctggagacggcgcactctgcctctaccagcgtgagccttgggtcaccagagcgcgccgtcgcctgcggcgacgcatcggagtagttttatgtggtcctctcaaa

SEQ ID NO: 15654 - RNA, 243 nt, unidentified
  source 1..243: mol_type = other RNA; note = Related to CP022196.1; note = Celeribacter ethanolicus
gttgagagcggtcacctatgactagtgctagcgagcgattcaaattcgcaccctcgggggcgaaggaggatcgctacaccactgtaaggtggatgttggggtacggattccggggcctcacggaaaagcccacgcatggctggagacggcgcactctgcctcatccagcgtatgcctcgggtcaccagagcgcgccgtcgcctgcggcgacgcatcggagtagttttatgtggtcctctcaat

SEQ ID NO: 15655 - RNA, 244 nt, unidentified
  source 1..244: mol_type = other RNA; note = Related to JAIUZF010000015.1; note = Salipiger thiooxidans
gttgagagagaccacctatgactagtgctagcgagcaatgcaaagtcgcaccttcgggggcgagggaggattgctacaccactgtaaggtggatgttggggtacggagttccggagcctcacgacaaagcccacgcatggctggagacggcgcactctgcctcttccatcgtatgcctcgggtcaccagagcgcgccgccgcctgcggcgacgcatcggagtagttttatgtggtcctctcaat

SEQ ID NO: 15656 - RNA, 248 nt, unidentified
  source 1..248: mol_type = other RNA; note = Related to JAHVJB010000004.1; note = Mameliella alba
cctgagagcgactgctatttgactagtgttagccggcagcaggaaacccgtccttacggtgggtagattgctgacatgctcatcctcacggttgagctttgggatagggattgcccgattctcacggccaagcctacgcatgattggagacggcacactctgcctcttccttcggctgtctctgggtcgccagagtgtgccgtcgcctgcggcgacgcatcggagtagttaaatgtggtcctctcaca

SEQ ID NO: 15657 - RNA, 222 nt, unidentified
  source 1..222: mol_type = other RNA; note = Related to VIRH01000027.1; note = Rhodobacterales bacterium
gttgagaggagccgcaattgattagtgttcgcaagcagttagtgtctattagctgcggcaactgcggttgttggggtaaggagttcctgatcctcatggaaaaactcatgcattactggaggcggagcacttcgacatttgtccggtgcgtgtgccttcggtgtcgaagcgctccgccgcctgcggcggcgtgacggagtaattgaatgtggctccctcaaa

SEQ ID NO: 15658 - RNA, 221 nt, unidentified
  source 1..221: mol_type = other RNA; note = Related to JAAXTE010000009.1; note = Rhizobium laguerreae
actgagaccgaccacatgttgattagtgttagcaagcaacgtcagttgtttacggttgccgcaaggcaaccgtcggggcaaggatttcctgtacctcgtgagaaagctcaggctgggctggagacgaagcactctgcaagtctcctacgtatgccttgggcagcagagcgcttcgtcgcctgcggcgacgcatcggagtaacagcatgtggtcgtctcacc

SEQ ID NO: 15659 - RNA, 221 nt, unidentified
  source 1..221: mol_type = other RNA; note = Related to AHZC01000134.1; note = Rhizobium sp.
gttgagaccgaccacatgttgattagtgttagcaagcaacgtcagttgcttacggttgccgcaaggcaaccgtcggggcaaggatttcctgcacctcgtgataaagctcaggcttggctggagacgaagcactctgcaagtctcctgcgtgtgccttgggcagcagagcgcttcgtcgcctgcggcgacgcatcggagtaacagcatgtggtcgtctcacc

SEQ ID NO: 15660 - RNA, 221 nt, unidentified
  source 1..221: mol_type = other RNA; note = Related to WIDU01000012.1; note = Rhizobium leguminosarum
gctgagacagatcacatgctgattagtgttagcaagcaacgtcagttgcttaccgccgtcttagggcggcggttggggcaaggatttcctgcacctcgtgagaaagctcaggcttggctggagacgaagcactctgcaagactccagcgtatgccttgggcagcagagcgcttcgtcgcccgcggcgacgcatcggagtaacagtatgtggtcgtctcacc

SEQ ID NO: 15661 - RNA, 231 nt, unidentified
  source 1..231: mol_type = other RNA; note = Related to PAYC01000024.1; note = Idiomarinaceae bacterium
tctgaggaagaccatataatgattagtgtagcgagcaggatatactctgtgtattctgctaccacagaagtaaatcattgtggtgggaggcgggagttcccgtcctctttggaaaagcccttgctgagcgagagcacagtcactctggcaatgttccctcgctggctcgggttgccagagcgactgtacgctctggtttaatcggagtaattgttatgtggtctcctcttt

SEQ ID NO: 15662 - RNA, 226 nt, unidentified
  source 1..226: mol_type = other RNA; note = Related to JXYC01000005.1; note = Marinomonas sp.
attgagagaggctgcatatgattagtgatagcaagcaacttactctaagttgctgtagttactttagtggtgactactggggtatggatttcctgatcctcatggaaaagcttacgcttggctggagggtgaatactctgccgtatacccacgtaagcctaaggccgccagagcactcatccgcctgcggcggtgtttcggagtaattatatgtggtctcctcaac

SEQ ID NO: 15663 - RNA, 223 nt, unidentified
  source 1..223: mol_type = other RNA; note = Related to JAAOIO010000006.1; note = Endozoicomonadaceae bacterium
attgagagaggctacatatgattagtgttaacacgcaactgaaaggttgcgatagttatttaataagtaactgttggggtaaggatttcctgaacctcatggaaaagcctacgcttgactggaaatggagtactctgcttccgccgcgtatgcctaaggtcagcagagcactccatcgcctgcggcgatgtatcagagtaatcgtatatgtggtctcctcaat

SEQ ID NO: 15664 - RNA, 223 nt, Vibrio parahaemolyticus
  source 1..223: mol_type = other RNA; note = Related to CP006008.1
actgagagagaccactaatgattagtgtttacaagcaactaacaagttgcggtacttttactatgtatgagtactggggtaaggatttcctgaacctcaaggaaaagcggacgcttgactggagacggagcactctgccttctgcccgcgtacgccttaggtcgccagagcgctccgtcgcctgcggcgacgatttggagtaatcgtatgtggtctcctcata

SEQ ID NO: 15665 - RNA, 221 nt, unidentified
  source 1..221: mol_type = other RNA; note = Related to PUHN01000047.1; note = Rhodobacteraceae bacterium WD3A24
gttgaggagggccgcacgtggctagtgtcagcaggcaactttgttgccgcagacgccactatggcggctgtcggggcgtggagtaccatggccctgtggaaaagcctacgcgagactggagattgcgcacgctgcctccttccgtcgtgggcctcgggtcgccagcgcgcgcagtcgccgtgccggcgccatcggagtagtccacgtgtggtcccctcatc

SEQ ID NO: 15666 - RNA, 203 nt, unidentified
  source 1..203: mol_type = other RNA; note = Related to NZ_CDRJ01000001.1; note = Ralstonia solanacearum
gctgagaagtaccgtctatagttagtgcaccaccgaaaccttcggggttcggtggcagtagagcccggattgccgcggtctcattggaatagcttgcgctgtaagggaagttcgaacaacttctccaagcatcgcaagcctcaggtcgaagtcgttcgaattacgccttaggggcgtcaaagtagctatgtggtcttctcagc

SEQ ID NO: 15667 - RNA, 199 nt, unidentified
  source 1..199: mol_type = other RNA; note = Related to NC_017559.1; note = Ralstonia solanacearum
gttgagaggcgtcactgacggttagtgtatcgccgaactgagttcggtgacttttagggtacggattgccgtttcccgcaggaagagctcatgcatgacaggaggcgagaagcgacttctctgccatcgcatgtctcgggtcgaagtcgcttctccccgcccgcttgggcgtcaaagtagcttatgtgggcctctcaac

SEQ ID NO: 15668 - RNA, 235 nt, unidentified
  source 1..235: mol_type = other RNA; note = Related to JADFZH010000217.1; note = Magnetococcales bacterium
gtgaaggggaacttcgggaacttggcaaaactgatcggagtaatggccggtcggtacccatggagacgcagtgatgtggttccatgaacggggagcggagtccgcagtcctggagacagcttatttgggtttgagtatgggtggtcgaccgtctttcgtttcgagcctcactgactggccgaccacccaccctgcgcagcggggttaaagcaagacaatggagtttccccttcac

SEQ ID NO: 15669 - RNA, 242 nt, unidentified
  source 1..242: mol_type = other RNA; note = Related to JADGBU010000012.1; note = Magnetococcales bacterium
gtgaagggaggcttcgttgaacttggcaaaaccgaccggggtcatggccggacggtaccatccagggataagcagcaatgcggatccctggtcggggctcggagtccgatgtcctggaaattgctttcttgagcttgagttggctgatcgaccaccctacgctttgcggcgtactcgcggtttggccgatcagccatcccgcgtagcgggttgaagcaagagatatggagttctcccttcac

SEQ ID NO: 15670 - RNA, 234 nt, unidentified
  source 1..234: mol_type = other RNA; note = Related to KN323041.1; note = Burkholderia pseudomallei
tgtgaaggggtgcttcgttgacttggcaaaactgaccggaggtaatggccagtcagtacccatgtcgtctcttcgagacgcatgaacggggctcggagtccgcagtcctggatacagcattcttgagcgcgagatgggtggacgaccagcttgagcttcgcggtctcgcgatcaggccgtccagccaccacgcagagcgggttaaagcaagaaatatgaagttctcccttcacg

SEQ ID NO: 15671 - RNA, 229 nt, unidentified
  source 1..229: mol_type = other RNA; note = Related to NZ_CP050013.1; note = Serratia marcescens
tgtgaagggaagattcgttaacttggtatcgctggctgcggccagtacccatggagtcactataatgtggaatcatgaacggggcgcggagtccgtcgtcctggaaatagctttcttaaaagcgagatgggaaatcgaccaacttgggttttgcttgtgtctcacgggtcgttcgatttcccaccccgcgatgcggggttgaagcaaggtatgaacttttcccttcact

SEQ ID NO: 15672 - RNA, 232 nt, unidentified
  source 1..232: mol_type = other RNA; note = Related to JAFKLC010000111.1; note = Rhodospirillales bacterium
gtggaggggagatttttgagcctggcaagactgtctgggtaaaatcaggcagtacctgatggggtgccatttggcatctctgcagacggggcgcggagtccgctgtcctggagaaagctactttgtgcgcgagatgggcgatcaagctgcctacgctttgctggtttctcgctaccagctcgatcgaccaccccgcagacggggttaaagcaggatgaacttccccctccac

SEQ ID NO: 15673 - RNA, 234 nt, unidentified
  source 1..234: mol_type = other RNA; note = Related to RFVU01000153.1; note = Betaproteobacteria bacterium
atgggggaacttcacgcgacttggcaaaaccggtcgaggtcatgggcgaccggtacccttgcggctgcgttgcagcggtcgcatgaacggggcgcggagtccgctgccctggaatgtgctgtctcgagcatgagatggtccatcgactgccgcaggcagcgccttgtgcgcagcaccccggtcgatggcccgccccgcccgcggggctgaagcaagccgatggagttcccccgc

SEQ ID NO: 15674 - RNA, 264 nt, Acinetobacter sp.
  source 1..264: mol_type = other RNA; note = Related to NZ_KB894370.1; note = Acinetobacter tjernbergiae
aatgtgatggacattttcgatttctggtagactgttgataaaatacttgattagtagttatcaactgtacagctataacttgattgtagtagttgttcggagctcagagtctgaagctctatgaaatagcttaattttaggcgatgattagccatttccgtattcgctcgttctgctctgctttctggcggcgcagcttcactctacgtaaacggctaaacccgccaaggcgggttaaagcagaggtcaaaatgtccacacaca

SEQ ID NO: 15675 - RNA, 267 nt, Acinetobacter sp.
  source 1..267: mol_type = other RNA; note = Related to NZ_NIWI01000032.1; note = Acinetobacter baumannii
aatgtgatggacattttcggtttctggtagactgttgatacctgttttataagtaggtatcgattgtacaacaaccacaatttgtttgtagttgtatgttgggagctcagagtctgaagctctttgaaatagcttaattttaggcgatgattagccattgtcgtattcgctcgttctgctctgcctgattgcggcgcagcatcactctacgtcaacggctaaacccgccatgcgggttaaagcagaggttgaaaatgtccacacata

SEQ ID NO: 15676 - RNA, 257 nt, Acinetobacter sp.
  source 1..257: mol_type = other RNA; note = Related to KB849902.1; note = Acinetobacter baumannii
tgtgatggacatccacaatttctggtagacgattgttcttaatatttaggagcagttgtacaggtactatttacttagtatctaacgggactcagagtctgacgtcctttgaaatagctatatttttggcgaagattagctattgattcttttcgctcgtactgtagtcgcctctgggggctcacagcttcgcgaaccatcaatagctaaacccgccgtcgcgggttaaagcagaggatttggtatgtccaatcaca

SEQ ID NO: 15677 - RNA, 236 nt, unidentified
  source 1..236: mol_type = other RNA; note = Related to NZ_CP034547.1; note = Burkholderia cenocepacia
gtggaggggtggccaagcatcagtcaaacgtggctacctaacttggtagttgcggccttgttgcgctgataggccaacaatgcggcatcgggagtcccggtgcctcggaagtagctttctcttgatcgaggttaacacgcggttcagagcttcgaaacagcgcctatacctctgaaccgtgtgttgaccccgctccgcggggcgggattaaagtgatgcttggcccttctctccac

SEQ ID NO: 15678 - RNA, 236 nt, unidentified
  source 1..236: mol_type = other RNA; note = Related to NZ_BBQM01000001.1; note = Cupriavidus basilensis
gtggaggggtgaccaagcatcagtcaaacgtggctacctaatttggtagttgcgaccttgttgcgctggaaggccaacaatgcggcatcgggagtcctgatgccttggaagtagctctctcttgatcgaggttaacacgcggttcagagcttcgaaacagcgcctatacctctgagccgtgtgttgaccccgcttcgcggggcgggattaaagtgatgcttggcccttctctccac

SEQ ID NO: 15679 - RNA, 189 nt, unidentified
  source 1..189: mol_type = other RNA; note = Related to NC_018020.1; note = Turneriella parva
gatggggttcagaggacttctggcaagaactcttagagtcaatttggaagtggatttccacaaccgctgaagtagcttatgattacatcaagcaccagtgtcccttttctcgcacggagccttacggaaaagcgacactggtcctcgctggcgcgaggttgaagcagatgttactctggaccccacatc

SEQ ID NO: 15680 - RNA, 271 nt, unidentified
  source 1..271: mol_type = other RNA; note = Related to NZ_CP028271.1; note = Mixta intestinalis
tttggggttccgtcgtgaaacttagttgtggtagatacatatatagtgtatcaactgccattggcagcctacgattccgtttgaatggtttgataggatgccaacgagcacggattccgtcgctctttgtagtagccttcgccagagtgagtagtgatgtgcacgtttgcgcgcgttcttttgctctgggggcaacgaagcctgtgcgcaaacgcgcgcatcacgacctcacttacgtgaggtgaagtaagtgactcaatggaaccccaac

SEQ ID NO: 15681 - RNA, 257 nt, unidentified
  source 1..257: mol_type = other RNA; note = Related to NZ_JUJG01000015.1; note = Pectobacterium carotovorum
tttggggttccatcgtgaaacttagttgtagtggatgcactaatagtgtatcaactgccttcggcagcttaatcgatctgataggatgtcgacgagcacggattccgtcgctctttgtggaagctttcgccagagtgagtagtgatgtgcgcgtttgcgcgcgttcttatgcttctggcaacgaagcctgtgcgcaaacgcgcacatcacgacctcacttgcgtgaggtgaagtaagtgactcaatggaaccccaat

SEQ ID NO: 15682 - RNA, 270 nt, unidentified
  source 1..270: mol_type = other RNA; note = Related to NZ_CP091099.1; note = Pantoea agglomerans
tttggggttccgccgtgaaacttagctgtagtgggtacatttttaatgtaccaacttccaatgactatcctaaaaaccgtttttacggtatgactggacgtctacgagcccggattccgtcgctcgctgtaaaagctttcgccagagtgagtaatgatgcgcacttttgcgctcgttcttttgctttggggcaacgaagcctgtgcgcaaaagtgcacatcacgacctcacttgcgtgaggtaaagtaagtgacacagtggaaccccaat

SEQ ID NO: 15683 - RNA, 250 nt, unidentified
  source 1..250: mol_type = other RNA; note = Related to JAANQB010000011.1; note = Cronobacter sp.
tttggggttccgtcgtgaaacttagtcgtagtaggccattttttaataggtcgacttccattgacattctgaaagattgtctacgagcacggattccggagctctttgtaattgccctcgcaggagtgagtaatgatacgcgtttttgcgcgcgttcttatgcctttgagggcaacgagactgtgcgcaaaaacgcgcatcacgacctcactaacgtgaggtgaagtaagtgacgcaatggaaccccaat

SEQ ID NO: 15684 - RNA, 273 nt, unidentified
  source 1..273: mol_type = other RNA; note = Related to PPXQ01000003.1; note = Massilia sp.
ttcggggttccgtcgtgaagcttagtcgtagctgatacgcactggccgtatcagcttccgttgatgactcttagattcggtgcatcggtctatggggttgtcattgagcacggacttccgtcgctcattgtaggtgccgccgcttgagtgagtactaatgtgcgctttcgcgctcgttctcctgctcctccgggcgtcgaagcctttgcgcaaaagcgcacatcagaacctcacttgcgtgaggtgaagtaagttatgcaatggaaccccaat

SEQ ID NO: 15685 - RNA, 271 nt, unidentified
  source 1..271: mol_type = other RNA; note = Related to JADJBR010000009.1; note = Zoogloea sp.
tctggggttccagcgtgaagcttagtcgtagtggatgggcgaattgctcgtcgacttccgttgattacttgtggattcgtgaagacggtcttccaggttttcatagagcacggattccgtcgctcgttgtaggagccgtcgctagagtgggttgggtcgtgcgcttttgcgctcgttctctgctccttcgggcggcgaagcctgtgcgcaaaagcgcacgacccgacctcactaacgtgaggtgaagtaagtgacgcattggaaccccaac

SEQ ID NO: 15686 - RNA, 273 nt, Achromobacter sp.
  source 1..273: mol_type = other RNA; note = Related to CADILF010000059.1; note = Achromobacter deleyi
tttggggttccaacgcaatgcttagtcgaagcggtgccatttaaaggcatctttttcgttgattacttgagttcgtgctatatgagcggctcgtcaggtgttcaaggagtgcggattccgctactcgtcgtaagagtcgtcgctagagtgagttgtagcgtgcgctttcgcgctcgttctctgctccttcgggcggcgaagcctgtgcgcgaaagcgcacgctactacctcacttgcgtgaggtaaagtaagctatgcgttggaacccccatt

SEQ ID NO: 15687 - RNA, 271 nt, unidentified
  source 1..271: mol_type = other RNA; note = Related to JAEUMY010000005.1; note = Betaproteobacteria bacterium
cttggggtttcagcgtgaagcttagccgtagtggatgcgcgcttgtcgcatcgacttccgtcggaggctggttgattcgcgtagacggtctatctggctttcgtagagcacggattccgtcgctcgttgtaggtgccgtcgctagagtgggttctgaactgcgcctttgcgcgcgttctctgctcctccgggcggcgaagcctctgcgcaaatgcgcagttcaggacctcactagcgtgaggtaaagtaagtgacgcgctggaaccccaat

SEQ ID NO: 15688 - RNA, 240 nt, unidentified
  source 1..240: mol_type = other RNA; note = Related to NZ_ATWO01000001.1; note = Desulfotignum balticum
tatggggttccagcgtggaaattagctgtaattggttcgaagccaataccaatactgaccagatgattcgttatctggtttatggtagagcacggattccggcgctcattgtgaaagccaccgcttggagtagaccatacataggccattctgacacgcgtaaagagcgccttcatgccagaatgccctatgtatcctcactacgtgaggtttaagtaaatgacacgctggaaccccaac

SEQ ID NO: 15689 - RNA, 254 nt, unidentified
  source 1..254: mol_type = other RNA; note = Related to CP033575.1; note = Shewanella algae
tttggggttccaacgtgaagtttagccgtcggtggtgtaatgccatcaccagcacgctttggaggggtgaaccctttgaaacgtgtagagcgcggaatccgttgctcattgtggtagccctcgctggagtgaactatgcctcgcgttttaaagcgcgtggtctccgcttgaggctacacccagcctttgctttaaaacgcgaggcataccctcacttacgtgaggtaaagtaaatgaatcgttggaatcccaat

SEQ ID NO: 15690 - RNA, 232 nt, unidentified
  source 1..232: mol_type = other RNA; note = Related to NAHO01000032.1; note = Snodgrassella alvi
ttttaggattccagcgtgaaatttagtattgtctatagctaatataatattagttatggatcacagcttattaacttaagttgttatgagtgcggattccgctactctatgtaatagccgatgatgaatgagaactacatgatgttatttaatccttgtaagtcttcacattaaataacatcatgtacctcactacgtgagttaaagtaaatgaaacgctggaatccttatt

SEQ ID NO: 15691 - RNA, 195 nt, unidentified
  source 1..195: mol_type = other RNA; note = Related to NZ_JAHNZV010000197.1; note = Psychromonas antarctica
acttagggtttcatcgtgaaatttagtgttagctggtctaacttcagcagagagtggattccacttctcaatggaaatgtctactattgcgcaagggtaatgcaaaagctttgttcatgcgtaggcttcattccaaatcttttgcatcaccctcacttcgtgaggttaagtagatgaatcgatggaaccctaata

SEQ ID NO: 15692 - RNA, 195 nt, unidentified
  source 1..195: mol_type = other RNA; note = Related to NZ_KB905170.1; note = Colwellia piezophila
acttagggtttcatcgtgaaatttagtgttagctggtctgacttcagcagagagtggattccacttctcaatggaaatgtctactattgcgtaagggtaatacaaaaactttgttcatgcgtagccttcattccaaaccttttgcatcaccctcacttcgtgaggttaagtagatgaatcgatggaaccctaata

SEQ ID NO: 15693 - RNA, 193 nt, Vibrio sp.
  source 1..193: mol_type = other RNA; note = Related to CP010032.1; note = Vibrio anguillarum
cttggggttctgtcgtgaaatttagcgttagctggtctaacttcagcagagtgtggattccactactcaatggaaatgtctactatagcgaaaggatgaagcaaaagctttgttcacgcgtgggcttcattccaaaccttttgcttcaccctcacttcgtgaggttaagtaaatgaatcgatggaaccccaat

SEQ ID NO: 15694 - RNA, 193 nt, Enterobacter sp.
  source 1..193: mol_type = other RNA; note = Related to VWWR01000002.1
cttggggatccttcgtgaaatttagtgttagcctgactaacttcagcagagtatggattccattactcgatgggaatgttaactattgcgaacggatgaagcaaaagctttgttcacgcgtagccttcgttccaaagcttttgcttcaccctcacttcgtgaggttaagtaaatgaatcgttggatccccaat

SEQ ID NO: 15695 - RNA, 203 nt, unidentified
  source 1..203: mol_type = other RNA; note = Related to NZ_CP078092.1; note = Geobacter sulfurreducens
taaggggctccagagaaaatctagtgaaggcccaacctgagtgttgggtacgagtaggcagcggattccgcgagccattggaatagcacatgaatgaacaaggatattaatggcaaacgcttacgttcgtatgccttactacgttcgccattaatgtcctcgcttcgcgaggttgaagtagatgagtatctggagcccgcttt

SEQ ID NO: 15696 - RNA, 257 nt, unidentified
  source 1..257: mol_type = other RNA; note = Related to PSRA01000192.1; note = Bacteroidetes bacterium
ggtgtgttgatcggaggactatttagccgtctgaaaccagcgggacgactgctggaatcagacagattccacggatggttcgccattcatggatggggaagtcggacagacttctctggaaagaactgacgcgaagacggctttgccgtccttgagcgtcacgccccaattaccttcggtgtctcgggagggccgcgacgctcatggtcccttcgggccctagaaggcgaggtaaatggaaacctggtcaacacacc

SEQ ID NO: 15697 - RNA, 260 nt, unidentified
  source 1..260: mol_type = other RNA; note = Related to NZ_CP036298.1; note = Aureliella helgolandensis
ggtgtgctggccgggtgaccgttcagccgtctgagcaagttggcgctgccgatttgcttcagacagattccgatgacggctcgcctgattcggatggggaagtcggaaaggcttctctggaaagaactgacgccaagacggctgcgccgtccgtgagtgtcgcgccccttgatccttcggccagagtgtcttcggcggagcccgacactcatggccacaagggctaaaggtgacgtgaatggaaacttggtcagcacacc

SEQ ID NO: 15698 - RNA, 246 nt, unidentified
  source 1..246: mol_type = other RNA; note = Related to JAAXWO010000007.1; note = Chlorobiaceae bacterium
ggtgtgcaggccgggcaatcgttcagccgtctggctctggtaacggggttcagacagaatccaatggcagttcgctgtttgaggatggggatatcggacagatatctctggaaaaaactgacgcaaaggcggctttgccgccctcaagcgtctccatctcgccaccttcgtctgctcgtgcggacggagacgcttcaggcaccatcggcttgaaggagaagtgaatggatgcctggtcagtacatc

SEQ ID NO: 15699 - RNA, 258 nt, unidentified
  source 1..258: mol_type = other RNA; note = Related to PNKZ01000003.1; note = Pirellula sp.
ggtgtgctgatcaggagaccgtttagccgtctggcgtgatcgtaaaacgacgcgttcagacagaatcgccggcggactgtctgccggcgatggggaagtcggacagacttctctggaaagaactgtcgctaggatggcttcgccatccataagcggcacggtccttttccctttggcccgagtgtctgtggtcggcccgcgccgctcacggccccagggggcttacggagacgtaaatggaaacttggtcagcacacc

SEQ ID NO: 15700 - RNA, 248 nt, unidentified
  source 1..248: mol_type = other RNA; note = Related to CP045236.1; note = Burkholderia cepacia
ggagtgccggctagtcagacgctcagccgttttcattctctgccagttgtgacagaaaatgaaaacagaatccaccgatggtgggtggatgggaaggccagaccggtctttctgggaagatctgacgcaatggcggctacgccgccctactctatcgagctccacatcctgcggcgactcgtaaggacctcgatagtgtaagacccaagggtcgaaggagaggtgagtggaagactggtcggcacacc

SEQ ID NO: 15701 - RNA, 255 nt, unidentified
  source 1..255: mol_type = other RNA; note = Related to JAGRPC010000052.1; note = Verrucomicrobiae bacterium
ggtgtgttggccgggggaccgttcagccgtctggtccgattgaggcaactcgtcgggtgcaggcagaatccgaggccagcgtgctggctgaggatggggatgctggacaagcgtctctggaaaaaactgacgcgaggtcggctgcgccgcccttgagcgtcgtcacccagcaaccttcggggcctcgtgtgggcgacgatgctcatggcccgaagggcgaaagggataagtgaatggaaacctggtcaacacatc

SEQ ID NO: 15702 - RNA, 261 nt, unidentified
  source 1..261: mol_type = other RNA; note = Related to NZ_SJPT01000002.1; note = Novipirellula galeiformis
ggtgtgctggccgggagaccgttcagccgactggcttggatcgcgaaagcgggcaagttcagtcagaatcggaaactggcttgccagtggaagatggggaatccggaatgggttctctggaaagaactgacgcaaagacggctccgccgtccttgtctgtcatgacgcaagttccttcgacgttgcctcctcgggagcgccatgacagacatggccctttcggctcaagtgagacgtgaatggaaacttggtcagcacacc

SEQ ID NO: 15703 - RNA, 254 nt, unidentified
  source 1..254: mol_type = other RNA; note = Related to SHMQ01000020.1; note = Candidatus Acidulodesulfobacterium acidiphilum
ggtgtgctgaccagtcttccattcagccgtttgcctaaaaaacaaacagattcagcatctcgcagtcaaaatgcgtggaggctgatggggaaatcagttcggtttctctggaaagaactgacgcaaggacggctttgccgtccatgtttgtcaaatctcaaataccttcggggtctcggaagagatttgacaatcatggtcccttggaccatgattatataaggagaagtgagtggaagactggtcaacacacc

SEQ ID NO: 15704 - RNA, 255 nt, unidentified
  source 1..255: mol_type = other RNA; note = Related to DNVK01000297.1; note = Lachnospiraceae bacterium
ggtgtgttggccaggggactgttcagccgtctggcctgatggagttaccatgaggaacagacagaatccacgaatgctttgcgtgacgtggatgggaaggccggacaggcttttctggaaagaactgatgcaaggacggcttcgccgtccatcaatgtcatgccacagaatccattcggtgtctcggaaatggcatgacattcatggcccttacgggctgagaggtgatgtgaatggaagcctggtcaacacacc

SEQ ID NO: 15705 - RNA, 262 nt, unidentified
  source 1..262: mol_type = other RNA; note = Related to NZ_QGKL01000023.1; note = Leucothrix arctica
ggtgcgctgactagttgatgttcagccatgtacaatgctctgtagtggttttatacgagtggtgtatatatattctgattagatgttatatctgtgatgatgggagagtcggatagattcttctggaaaaaactgatgttaaggtggctttgccacccgtgtgtgtcacacaaaaccgactagatcgtcttcggggtgtggtgcaacactcatggacccaagggttcaaaggagaggtgaatggagacttggtcagcacatc

SEQ ID NO: 15706 - RNA, 258 nt, unidentified
  source 1..258: mol_type = other RNA; note = Related to CABVQD010000004.1; note = Burkholderia sp.
ggtgtgctggccgggcgaccgttcagccgttgaccgatgatgaaggcagtgcctttcaggagtcgacaaattctgtcgtagcttctacatcgacagatggagatgtcggacaggcatctctggaaagatctgacgctaaggcggctgcgccgcccttcagtgtcatgccccaatcaccttcgatgtctcgggagagccatgacactgatggccccgtgggctcaaaggagaggtgaatggagacctggtcagtacacc

SEQ ID NO: 15707 - RNA, 255 nt, unidentified
  source 1..255: mol_type = other RNA; note = Related to SSEJ01000200.1; note = Gammaproteobacteria bacterium
ggtgtgctggccgggcaaccgttcagccgccaatccggaaggagcttgcttctcttgggttggcagattctgtagaggttttggcttttacggatggggatgtcggacagacatctctggaaagatctgacgctaaggcggctacgccgcccttcagtgtcatgcttcaatcacctgcggtgtctcgggagaaccatgacactgatggccccttgggctcaaaggataggtgaatggaagcctggtcagtacatc

SEQ ID NO: 15708 - RNA, 264 nt, Pseudomonas sp.
  source 1..264: mol_type = other RNA; note = Related to CVTP01000021.1
ggcgtactggccagtcgcccacttagccgcccaagcgtagtaaagtgctaagcgcaattactacgtgacaggctgattctgcctgagcctgactttggtagatggggatatcggatagatgtctctggtaagatcttacgctaagggcggcttcgccgcccttcatggccatgcaacaagatttcagcgatgacttggaagtcgcatggccgtgatggcccctagggtcaaaggagaggtaagtggaagactggtcagtacatc

SEQ ID NO: 15709 - RNA, 255 nt, unidentified
  source 1..255: mol_type = other RNA; note = Related to NC_008786.1; note = Verminephrobacter eiseniae
ggtgtgctggccgggtaaccgttcagccgctgactgatggagactcagtctctcaaaggttggcagattccgtcgcagcctcggcttcggcggatggggatgtcggacagacatctctggaaggaactgacgccaaggcggctacgccgcccttcggtgtcacgtcccatgcaccttcggcgtctcgggagagacgcgacaccgatggccccttgggctcaaaggagaggtgaatggaagcctggtcagtacacc

SEQ ID NO: 15710 - RNA, 255 nt, Pseudomonas sp.
  source 1..255: mol_type = other RNA; note = Related to DAFPEA010000002.1; note = Pseudomonas aeruginosa
ggtgtgctggccgggtaaccgttcagccgccgaccgatggagaccctgtctctgtgaggtcggcagattctgttgaagtctcggcttctgcggatggggatgtcggacagatatctctggaaggaactgacgccaaggcggctacgccgcccttcggtgtcacgtcccaatcaccttcgttgtctcgggagagacgcgacaccgatggccccttgggctcaaaggagaggtgaatggaggcctggtcagtacacc

SEQ ID NO: 15711 - RNA, 246 nt, unidentified
  source 1..246: mol_type = other RNA; note = Related to JADZHH010000033.1; note = Shewanella algae
ggtgtgctggccaagttaacattcagccgttgacaggtgactctcacctgtcgactgattctgtagaagcctttacttttacggatggggatgtcggagaggcatctctggaaagatctgacgctaaggcggctgagccgccctttagtatcatgcctcaatcaccttcggtgtctcgtaagagccatgatactaatggccccctgggctcaaaggagaggtgaatggaaacttggtcagtacacc

SEQ ID NO: 15712 - RNA, 257 nt, unidentified
  source 1..257: mol_type = other RNA; note = Related to NZ_CP012264.1; note = Cronobacter condimenti
ggtgtgctgatcagcactccgttcagccgttaaacaatgatgagtgaaattcaccgcttgtttgacagaatctgttgtggcttttgttacaacggatggggatgttggagaaacatctctggaaagatctgacgcaaaggcggctacgccgcccttcaatgtcatacattaacggccatcgaggactcggaaaatgtatgacactgatggccccctgggctcaaaggataggtgaatggaaatctggtcagcacacc

SEQ ID NO: 15713 - RNA, 258 nt, unidentified
  source 1..258: mol_type = other RNA; note = Related to JAAQVQ010000001.1; note = Providencia heimbachae
ggtgtgctgatcggtattctattcagccgttaaacaagaatgagtgatttatcaccacttgtttgacagattctgttgtagcttctgttacaatagatggggatgttggagaaacgtctctggcaagatctaacgctaaggcggctacgccgcccttcaatgtcataccttatgggccttcgaagactcggaaaatgtacgacactgatggccccctgggctcaaaggataggtgaatggaaatctggtcagtacacc

SEQ ID NO: 15714 - RNA, 256 nt, Salmonella sp.
  source 1..256: mol_type = other RNA; note = Related to AAMXLY010000014.1; note = Salmonella enterica
ggtgtgttgactagtgttctattcagccgccaatcatgagctgatgaggtaatcacggtctggttggctgattctgtagcacatgttgttatggatggggatgtcggagagacatctctggaaagatctgacgctaaggcggctacgccgcccttcaatgtcatacattaacggccttcggggactcggaatatgtatgacactgatggccccttgggttcaaaggataggtgaatggaaacctggtcaacacacc

SEQ ID NO: 15715 - RNA, 231 nt, Pseudomonas fluorescens
  source 1..231: mol_type = other RNA; note = Related to JAGGOG010000019.1
ggtgcgctgactaggaactttttagccgccctcatgcgagggtgaattgagatagccttggctagatcgatggggataccggataggcatctctggaatagtctgacgtttggggcggccagccgccccaccgatgccgtgaactctgaccgtcgaggtctcggaaatccacggcattggtggccccctgggcctaaaggagagggtaaatggtttcctggtcagcgcatc

SEQ ID NO: 15716 - RNA, 262 nt, Pasteurella sp.
  source 1..262: mol_type = other RNA; note = Related to BQFX01000025.1; note = Pasteurella canis
ggtgtgctgactcaaaatccatttagtcttcaatattagtggcttataaccattggtactgagaaatctaatgaaacctaatgtttcataggtggggatgtcggatagatatctctgaaaatatgtcacgtaatggcagtcaaactgcccttcaatatcaatcacagctattccatacgaagccttgggatgtgattgatattgatggttccctatcaggaacctcaaaggaaaaagtaaatggaaacttggtcagcacacc

SEQ ID NO: 15717 - RNA, 273 nt, unidentified
  source 1..273: mol_type = other RNA; note = Related to NZ_UEWY01000045.1; note = Haemophilus influenzae
ggtgtgctggctaaaatactatttagccatcaatcaatattatgagtctctatatctctaatattgaggttgaggaatctacgaaacttttagtttcataggtgggggtgttggatagacatctctggataaatctaatgtaaaggcagttagactgcccttcaatatcaatcctaactatttcctacgaagacttgggattaggattgatattgatggttcccccttggggaaccccaaaggtaaagtaaatggaaacttggtctgcacacc

SEQ ID NO: 15718 - RNA, 259 nt, unidentified
  source 1..259: mol_type = other RNA; note = Related to QEPO01000001.1; note = Haemophilus parainfluenzae
ggtgtgtggattaaaaaacatttagccatcaatattgttgatagtattgatgaatctgcgaaacttttagtttcataggtggggatattggataaatatctctggataaatcttatgttatggcagttagactgcccttcagcatcaatcctagcttttcctacgatgtctcgggataggattgatgttgatggttccccccctcgaacgggagggagaacccaaaaggaaaagtaaatggaaattttttctgcacacc

SEQ ID NO: 15719 - RNA, 249 nt, unidentified
  source 1..249: mol_type = other RNA; note = Related to NZ_CAJZCI010000001.1; note = Snodgrassella alvi
ggtgtgctgagcaataaactgttcagccgttgatatcacagatatcaacagaatctattgaagctttaagtaatatagatggggataccggataggcatctctggaaagatctgacgttagggcagttctgctgccctttactatcaagtcccaatgttttccttccgcagccttggatggaacttgatagtaatggttccctaaaggaactcaaaagggaaagtgaatggaaaattggtcagcacatc

SEQ ID NO: 15720 - RNA, 242 nt, unidentified
  source 1..242: mol_type = other RNA; note = Related to FR900422.1; note = Fusobacterium sp.
ggtgtattaatcaagcttctgctcagccgttcgctaataatacgcgaacagattcagataatattaattataatttatctgatgggggattcggattgaattctctggaaagaactgacgaaataacggcaaagccgtcctctatcattgaacctatctatccatcggggtctcgggtgcgcttcaatgataaaggtcatgaagactaaaggagtagtgagtggaagcttggtcaatacatc

SEQ ID NO: 15721 - RNA, 238 nt, unidentified
  source 1..238: mol_type = other RNA; note = Related to NZ_SMLM01000002.1; note = Ramlibacter henchirensis
ggtgtgccccttgaatccgcttagccgctcgcgccgtaaaggcgtgggcagaattcctgagcgcttgtcgtttgggaatggggaagccgggtaggcttctctgggaagatctgacgcaaaggcggcttcgccgcccaatatcgtcgtgccaaaatgaccttcggcgactcgtattcgccacgacgatgtcggacccgaggtcaaaggaagaagtaagtggaaacttggtcggcacacc

SEQ ID NO: 15722 - RNA, 277 nt, unidentified
  source 1..277: mol_type = other RNA; note = Related to NC_010334.1; note = Shewanella halifaxensis
ggtgtgctgattcaacctccaatcagccgcaaactcttctacaaaaagcgtcaaatgactcgtcaaatgaccaagaagaatttgcagattctatctgggatttttaaattctgatagatggggaaatcggagaggtttctctggaaaaaactgtcgcaatggcggcttcgccgccctagtatgtcatctctcagtatccatcgaagactcggtagagagacgacatactaggcccttgggcaaaaggtaaagtgaatggaaagttggtcagcacacc

SEQ ID NO: 15723 - RNA, 240 nt, Acinetobacter sp.
  source 1..240: mol_type = other RNA; note = Related to NZ_BKIP01000082.1; note = Acinetobacter lactucae
ggtgtagtgattaaacttaccattcagccgttattactctcgaaagaggttttaactgattctacaattgtagatgggaatattggataggtattcttggaaagaacttacgttaggccgatcaagtcggcctttatatgtgtgtgcccctaaaggaagccatcggagtcttgtagacacacacatataatggacacaaggtccaaaggattaggtgaatggaaatttggtcactacatc

SEQ ID NO: 15724 - RNA, 256 nt, Acinetobacter sp.
  source 1..256: mol_type = other RNA; note = Related to NZ_LMED01000026.1
ggtgtagtgattaagtttcactattcagccgttactgctctctacctaatagagactttaactgattctacaattgtagatgggaatatcggatagatatttttggaaagaactcacgataggtcgataaaatcgacctttatatgtatgcgcctttgaagtgaacttcaatagaccttcgaagccttgtagacgcatacatataatggacacaaggtccaaaggattaggtgaatggaaacttggtcactacacc

SEQ ID NO: 15725 - RNA, 240 nt, Acinetobacter sp.
  source 1..240: mol_type = other RNA; note = Related to CP029610.1; note = Acinetobacter pittii
ggtgtagtgattaaacttaccattcagccgttattgctctctaagggagctttaactgattctacaagtgtagatgggaatatcggatagatatttttggaaagaactcacgttaggccgatcaagtcggcctttatatgtgtgtgcccctaaaggaagccatcggagtcttgtagacacacacatataatggacacaaggtccaaaggattaggtgaatggaagtttggtcactacatc

SEQ ID NO: 15726 - RNA, 273 nt, unidentified
  source 1..273: mol_type = other RNA; note = Related to QMMV01000171.1; note = Deltaproteobacteria bacterium
ggtgtgccagccaggggaccattcagccgtctccctctgggtttatcaatccagggaagacagattctgccgcagtgatgtcggcagatggggaagtcggaaaggcttctctggcaagaaccgacgctacggcggctacgccgcccgtgacgccggacgctaccgcgtccgtcaatgtcgtgtcccaacggccttcgaagcctcggaagggccacgacattcacggccccaaggggctgaaggaggagtgaatggaaacctggtcggcacacc

SEQ ID NO: 15727 - RNA, 223 nt, Vibrio parahaemolyticus; identical to SEQ ID NO: 15664
  source 1..223: mol_type = other RNA; note = Related to CP006008.1

SEQ ID NO: 15728 - RNA, 198 nt, unidentified
  source 1..198: mol_type = other RNA; note = Related to NZ_KE150238.1; note = Bilophila wadsworthia
tatgggggatactcatgtatctagcggtcgcctgcttttcttagtgaagagcagcatgggacggatttccgaaccagcaaagttgtaacatgtcttcgacattcatgtgctcgccttattactccggagcctcgtgaacggcaagcacatgaatctcgcttcgcgagttaaaagtagatgcaaagagtatcccccaat

SEQ ID NO: 15729 - RNA, 204 nt, Desulfovibrio sp.
  source 1..204: mol_type = other RNA; note = Related to JAJQDW010000013.1
agtatagggggaaagttgcgatctagcacttcggcctgtgtttgttcacagcctggggaacggaatccgaacccttgcattgaagcaccttttaaactgcgatatagctacgtgagtccttgaggctccggggtctcacaaggactcacgcagctatttcgcgccttgcgctaaaagtagatgcagcaactttctccctatact

SEQ ID NO: 15730 - RNA, 206 nt, unidentified
  source 1..206: mol_type = other RNA; note = Related to NZ_JHVB01000001.1; note = Treponema sp.
ttgcaggcaccaaattattagtctagctactcgtaatgagacctgttttaaaaacatttggaaagacagatttctgtttttcttggtaaaatcgaccgcttaatatttctgtcaatggaagcctcgttcctacgcagtggcttgggtcgtttccattgatagatatacatcatggttaaagtagatgaaaatttggcagcctgctc

SEQ ID NO: 15731 - RNA, 246 nt, unidentified
  source 1..246: mol_type = other RNA; note = Related to JAFIBQ010000001.1; note = Arthrobacter sp.
ggtgaggagatggtagaaggtggcctagaaatgaagttgcggcgtcgtcgtgactcgttgagcgatatcgctcaagtggttcgttttcgaacctcggtgccccggatagccggcgcattcggactagctcgcgcaacgcgtgcaagcacggacaggccgccctgcgtgtgccttcgggctcttcctgcccgtggatccctccgggatctcccatcagagtaggcccaaatttgccatctcctcatc

SEQ ID NO: 15732 - RNA, 245 nt, unidentified
  source 1..245: mol_type = other RNA; note = Related to SOHL01000027.1; note = Cryobacterium sp.
ggtgaggagaccggtgcccggacacctagtgatgaagtcgggacgtcgttccgactcgttgagcattcgtgctcaagcgattcttcttagaattgcgggatcttcgcaaacggagattctcggacaagctcacgcaacgcgtgtgtgcacggacaagacgccctgcgttgtctccgggctcctcttgcccgtgaatccctggcgggatttcgagtcagagtagatgtccacaccgtcccctcacc

SEQ ID NO: 15733 - RNA, 239 nt, unidentified
  source 1..239: mol_type = other RNA; note = Related to NZ_PJJL01000059.1; note = Cryobacterium sp.
ggtgagaggaaagttttttagtctagagatgaagtcgtgacgttgtcatgactcggtcggtgaaagctcgatgatccgcattcggatcggggtcatagcaaactatgactttcggactagctgtcgcaacgcgtgtacctgcggacaaaccgcccctacggggacttcaggctccctttgcccgcacatccctacgggatagaagaactcaaagtagatgacgaagctttcctctcacc

SEQ ID NO: 15734 - RNA, 219 nt, unidentified
  source 1..219: mol_type = other RNA; note = Related to NZ_QETB01000005.1; note = Proposed Ancrocorticia populi
ttggagagatcgcagcgaagcggttgtgccagttttctggctcgaagggttgaggggattcccctcaatctggggtgcggctgaccgtgctctacggaagagcttccgcaatggttgggcggcggcagctatctgctacgcatctacctgccgtcccgccccgttccggcaactctccgtttgacaacgtcgagatcaaagttagttgcgatcctccac

SEQ ID NO: 15735 - RNA, 218 nt, unidentified
  source 1..218: mol_type = other RNA; note = Related to RKHG01000001.1; note = Luteococcus japonicus
gatgaggagcatccgtaggtgcgcctagattgccacccatcgcggtggtcggatctcgggttggacttctaaagtcccgcctccgcacgagcttccgctacgcctgagttgcgacctcccacccccggtggcgtgtgcctttccgggtgcaggagcccgcaaccgaggggacttcgtcaaaatattgggtaggttcatgtctatagatgctcctcatc

SEQ ID NO: 15736 - RNA, 232 nt, unidentified
  source 1..232: mol_type = other RNA; note = Related to NZ_VSSB01000001.1; note = Agromyces mariniharenae
ggtgaggagggagcgttcgcttagtgatgaagctgccgccttgcggcagctcgctagggcgcaaccacagtgttgcgcccgtaggtcctggctaaccacgaccgtaggacgagccgaggctacgcgtggagctggatggcaagttcctgtcctcgatgactcggggccttcccatccagacctgcgtgaccctgccgggtcgaagggtaagtgaacatgcgccctcctcacc

SEQ ID NO: 15737 - RNA, 216 nt, unidentified
  source 1..216: mol_type = other RNA; note = Related to JYIY01000074.1; note = Microbacterium ginsengisoli
gatgaggggaagaactggtctgcttagtgatgcagccggcacgttgtgtcggctcgtggagtcgactggctccaggacgcggctgaccgcgttcaccggacgagctcaggctacgcgtggtggggcaaacgccacctacctacggagcctggggaggcgttcgccccacccttcgggaccgggggtcaaagtaagtggctgacgcttcccctcatc

SEQ ID NO: 15738 - RNA, 218 nt, unidentified
  source 1..218: mol_type = other RNA; note = Related to CP096184.1; note = Demequina sp.
ggtgaggagagaaccgcgttacttagagacccgatcagcacgtagtgctgatccgaatggcacttgtgccttggggtacagctcactgtgctctgcggacgatcacacgcctccgcgtgaatcgacaagcgcgtcaggcctacgctgtctggcgacagcgctcgtcgatcccttcggggccggaggccaaaggtaagtgacaagggactctcctcacc

SEQ ID NO: 15739 - RNA, 214 nt, unidentified
  source 1..214: mol_type = other RNA; note = Related to WOXZ01000002.1; note = Rhodococcus sp.
gatgaggagtcgaggtggtgaatctaggacgccggtgcctcgcgccggcacgtcgagtcgaacggctcgaaggtcacggctgaccgtgatcgttggactatccctcgctacgcgtgcccgggcgaacgtgacatttcccgacgcgagctggggccacgtccgcccgacctgtcgggataacaccaaaagtagatgaacccctcgactcttcacc

SEQ ID NO: 15740 - RNA, 217 nt, unidentified
  source 1..217: mol_type = other RNA; note = Related to CP043474.1; note = Mycobacterium grossiae
ggtgaggagtcgggtggcgaacctagcggagtcggtgcatcgcaccgacggatcgagccaattggctcgaaggtcgcggctgaccgtgaccgtcggacaagctcccgctacgcatggtcaggcgaacctcgcctgccgacggagactggggcgacgtccgcctacccttccgggattacaccaaagtataagtagatgaaccatccggctcctcacc

SEQ ID NO: 15741 - RNA, 214 nt, unidentified
  source 1..214: mol_type = other RNA; note = Related to JAAVUN010000029.1; note = Kocuria subflava
gatggggagccgagtgggggatctagcgaagccgacgcctagtgtcggcgcatcgagtcgcaagactcgacggttgcggctgaccgtaaccgatggacgagccctcgctacgcgtggggaggcgaacctgcccaacgccgacgcaggctggggggcatgtccgcctacccttgcgggatgacaccgaagtagatgaaccactcgtctcctcatc

SEQ ID NO: 15742 - RNA, 212 nt, unidentified
  source 1..212: mol_type = other RNA; note = Related to SOCP01000015.1; note = Actinophytocola oryzae
ggtgaggagacttgtggaacacctagtgatgccgatacatggtatcggcgcgttgagtcctatggctcaatggttgcggctgactgcaaccgccggacgagcctgcgctacggttggcgaggcgaagccctctggcccgacggagactggggaggacttcgcctcccctgtcgggatatcaccaaagtagatggaccactcgtctcctcacc

SEQ ID NO: 15743 - RNA, 212 nt, unidentified
  source 1..212: mol_type = other RNA; note = Related to NZ_LMQC01000012.1; note = Modestobacter sp.
ggtgaggtggcgggaggcgcacctagtgaagccggtgccttgcaccggtcggtcgggccttctggcccgaggaccacgccttggcgtggtcatcggacgagctgccgctacgcgtggctgggcgagcacacttcgccgacgacgactggctgtgcactcgcccatcccttcgggaatacaccaaaagtagatgagccaaccgccacctcacc

SEQ ID NO: 15744 - RNA, 234 nt, Corynebacterium sp.
  source 1..234: mol_type = other RNA; note = Related to NZ_CP009220.1; note = Corynebacterium deserti
ggttaggggaaaaatggtaagtttagcgatagttactacgtcgtagtaacactcgccccatttgttggggtgtaagtttgatttggtgcacggaggaagccttagttttcctctgcggtcgagcggatgctctcttgctgcgcgcgggatgctctttacctacacgctcgttccgaaagagcctcccgcaccccaggcaaggctcagagtaaatgaacaatttttcccctaatc

SEQ ID NO: 15745 - RNA, 217 nt, unidentified
  source 1..217: mol_type = other RNA; note = Related to PVTL01000007.1; note = Glaciihabitans tibetensis
attgagatgagacgcgtgaacagcctagagatgaagcctgctaaaaaagcaggctcgggcatcgaaaggtgtcaggttgcagcgctctgtgatcggcggccaagccatcgattcgaaggcgccgggaagcttccgcttcccgaagcctcgaaaagcggaagctccccgccccttcgggggaggattaaagtaggtgactagcgcgcctcatctcaac

SEQ ID NO: 15746 - RNA, 219 nt, unidentified
  source 1..219: mol_type = other RNA; note = Related to NZ_QHLY01000005.1; note = Cryobacterium arcticum
actgaggtgagattcgtgcaatacctagggatgaagcctgtccatgcgacaggctcgggcatggaagcatgtcaggttgcagcactctgcggtcgccggccaagccagcgattcggaggcgacggtgaggctttcctccccgaagtctcgatgagaaaaccctcaccgtccccctccgggggaggttcaaagtaggtgcgtaacgaagcacacctcagt

SEQ ID NO: 15747 - RNA, 215 nt, unidentified
  source 1..215: mol_type = other RNA; note = Related to NZ_UXAU01000021.1; note = Arthrobacter ulcerisalmonis
actgaggtgaacgagtgaattacctagtgatgaagcctggcatattgcctggctcgggcaccgagaggtgtcaggttgtggcaatccacgaccggtggacaagcttccgattcggaggcgtcggtgagtgattcctcctcgaagtctcgacgaggaatcactccccacccctccggggaggttcgaagtaggtgagcacagacgcgcacctcagt

SEQ ID NO: 15748 - RNA, 219 nt, unidentified
  source 1..219: mol_type = other RNA; note = Related to JADKSK010000002.1; note = Plantibacter sp.
gctgaggtgagtgttgtatggaacctagtgttgaagcctggctaattgcttaggctcgggcgtcgagaggcgtcgggttgtgacaattcacaatcggcggccaagctatcgattcggcggtgatggtggggcctcgccccccgaagcctcgaagggcgaggccccaccatccccctccgggggagaatcagggtaggtcaagtgagcactcacctccgc

SEQ ID NO: 15749 - RNA, 185 nt, unidentified
  source 1..185: mol_type = other RNA; note = Related to NZ_CP080029.1; note = Streptomyces anulatus
gctcagggaggggcgctgagatctagtactgccggttccgtcgggaccggcccagccgggtctccttcgtggagccccggaggcagggcggcaccgtgggtgccgtccgtgaatcaactcccgcgtgacctggaaggtctggccggggggaacgcaaaggtagatggtcagcgcctcccctcatc

SEQ ID NO: 15750 - RNA, 185 nt, unidentified
  source 1..185: mol_type = other RNA; note = Related to BMRN01000021.1; note = Streptomyces atratus
gctcagggaggggcgctgagatctagtactgccggttccgtcgggaccggcccaaccgggtctcttcacagggcccgggggcagggtggcgtcgtgggcgctgcccgtgaatcaacttccgcgtgaccgtgtggtcgggccgtcggaaggaaagtaaaggtagatggtcagcgcctcccctcacc

SEQ ID NO: 15751 - RNA, 232 nt, unidentified
  source 1..232: mol_type = other RNA; note = Related to NZ_FMCR01000007.1; note = Micromonospora saelicesensis
cctgaggggagccgtgtgacatctagatccaggtcggcccgtcgggtcgaccacggccgcagcgagtccgcggtgcgagagcgggccgtgagtttctcacgcgctccgttcaatcccacgttcgcgtgcggtcgcgaagacgctgcatcctcgatgcctcggcgcgtcttcgcgaccccgctgccgcgatgggaaggaattcaaaggtagatgactatcggctcccctcacc

SEQ ID NO: 15752 - RNA, 230 nt, unidentified
  source 1..230: mol_type = other RNA; note = Related to NZ_BOML01000042.1; note = Actinoplanes durhamensis
gctgaggggagccatgtgacatctagatccgagtcggcccgtcgggtcgaccacggctgcgggcaaaccgcggtgcgcaagcgggtcgtgggtttactgcgactccgttcaatctcgcgttcgcgtgggtcgcgaaggcgctgcatcctcggcgcctcggcgcaccttcgcgaccatgctgccgcgcgagaaaggaatccaaaggtagatgacgactggctcccctcacc

SEQ ID NO: 15753 - RNA, 235 nt, unidentified
  source 1..235: mol_type = other RNA; note = Related to JAAGNB010000860.1; note = Amycolatopsis sp.
actgaggggggtcgatgacttctagttatccggtatcgttgatgccggggcggccggaacggtcttccgtttcggggcatacgtgcaggcgacagattgcactgtcgtctcgatcaaacccacgttacgccgagtggtgcaacgcgaagctccgggtcgatgtctccgggttcgcgttgcaccattcgctccgctgaagggccccaaaggtagatgatcaccgactcccctcatc

SEQ ID NO: 15754 - RNA, 227 nt, unidentified
  source 1..227: mol_type = other RNA; note = Related to NZ_LIRL01000059.1; note = Streptomyces niveiscabiei
cctgaggggggtccgtgacgtctagcgtctgtcgatgccgttggtgtcgacaccgccgggttggacccggggcttatgcaggcggcgggatacccgcaagcctggaccaaacccgcgcttcgcctcctgccgtgaaccgcgctgctccggcgatgtcttgggcgcggctcacggcacgactggcgtcgcggaggctcaaaggtagatgatcactggctcccctcacc

SEQ ID NO: 15755 - RNA, 204 nt, unidentified
  source 1..204: mol_type = other RNA; note = Related to NZ_BLPF01000004.1; note = Phytohabitans houttuyneae
attgaggggagtcggtgcgatctagataccgtcggggccgttggccccgacacagctagccggcgccgttggcgccggcgttggtcaagcccgcgcaagcgcctggaacgagtggcgtgcctggtccctcggggcctcggcgtcacgccactcggccctgccgggcggagaatcgaaggtagatgcgcaccgactcccctcacc

SEQ ID NO: 15756 - RNA, 216 nt, unidentified
  source 1..216: mol_type = other RNA; note = Related to BOPG01000023.1; note = Virgisporangium aurantiacum
cttgaggggggccgttgacatctagaaccgtcggagccgtcggctccgacacaggggcgacgagtccgttgccggcaccgtgggtgccggcgttggtcaagcctgcgctcgcgtctggaaacgcgtggcgtgccttaccctcggggtctcggccgtcacaccacgcggcaccctccgggtgcatccgaaggtagatgactatcggcccccctcacc

SEQ ID NO: 15757 - RNA, 225 nt, unidentified
  source 1..225: mol_type = other RNA; note = Related to CP063844.1; note = Streptomyces sp.
gcgggagagtcggtgacggcctagcgcaatcgacgaggtcatcgtcgagtcaacggtctgcatttgcaggtcaggctgcggtcgtgagccgcacgctgtggacaagctgtcgaacgcctggatggtgcgaggcgcacgtgctcctacgggggtctggcgcgcgactcgcaccagcccgccggggcgggatacaccgaaggtaggccaccccatcgactctcccgc

SEQ ID NO: 15758 - RNA, 233 nt, unidentified
  source 1..233: mol_type = other RNA; note = Related to SISL01000011.1; note = Verrucosispora sp.
gcttagggggagtcggtgacacctagagatgtcggtggggcttgctgggcaggctgcatcgacgcagatggcccgcaaggcgggccaggcggatggcgttgccgatccgctgtggagaaacctccgaagcgcatgcggcgcgaagcccaggcttctcctacgtgggcctggggcgtgggcttcgcgaccctggcgggatggcaccaaaggtagatgtcaaccgactcccccgc

SEQ ID NO: 15759 - RNA, 230 nt, unidentified
  source 1..230: mol_type = other RNA; note = Related to SSXE01000007.1; note = Nonomuraea sp.
gttgaggagggccggtgacatctagtgcgtccgatacctcgcgtatcgacgcggaatggtggttgttccgacgaccacccggcattcgatgtgatcgggtgctgcggacgatcctgctaccgcctgaggggtgtcctcgcgcttcctcctacggggcctggcgcgagaggacacccttgggcttcaggcggaaggacatcaaaggtagatgatcaccgactcacctcacc

SEQ ID NO: 15760 - RNA, 232 nt, unidentified
  source 1..232: mol_type = other RNA; note = Related to SAUN01000001.1; note = Nonomuraea polychroma
actgaggagagcccgtgagatctagagttgtccggtgccgagagggtatcggcgagatgggcggctattttgcagccgcctgggcgcacggcgtagtcgtgcgctgcggacaagctcctgaccgcctgcccgggaaactcgccctgatcctacgtgagcctggggtcgagttccccgcgctagccagcggacaagggacatcaaaggtagatgatcactgactctcctcatc

SEQ ID NO: 15761 - RNA, 213 nt, unidentified
  source 1..213: mol_type = other RNA; note = Related to NZ_CP084582.1; note = Micromonospora aurantiaca
gctgaggagagtcgaggatgtttagcatccagcgtttcgacgctggcacgccgggcatagtccggcgggcaggggatgtcatcctctgcgttggccaagctctcgccgacgccgggcaagccgacggtgccgcgcgcggggccttcacttgcaccgccgcctgtccatcggcggaaggacttcaaaggtaaatgaccctcgactctcctcacc

SEQ ID NO: 15762 - RNA, 211 nt, unidentified
  source 1..211: mol_type = other RNA; note = Related to NZ_JAFEUC010000033.1; note = Micromonospora humida
cttgagggagtcgtaggcgtttagcggcccggcatcgtgccggcattcgccagggatgccctggcggcggagagggttaccctccgttgtggacaagcactcgctaccgccgggaacagcacagcgaacccgggcgtatgcctggggcacgctgcgctgcgcctgtcggcgtggggaggccaaaggtaaatgacctacgactccccccacc

SEQ ID NO: 15763 - RNA, 221 nt, unidentified
  source 1..221: mol_type = other RNA; note = Related to JACASO010000007.1; note = Pseudonocardia pini
gctgaggggggtcggtgacatctagtgattgctggcgccgtgggcgtcagcgcatcccgggcatgtcgtgtccgggagcgtcgagcgttgccgacgccgtggacaagctgacgctgcgccttagcaggcaaagcgcgtctgtcctcgtgtgcctcaggaagcgctctgcctgctccctggcgggaatacaccaaagtagatgatctccgactcccctcatc

SEQ ID NO: 15764 - RNA, 233 nt, unidentified
  source 1..233: mol_type = other RNA; note = Related to NC_014666.1; note = Frankia inefficax
gttgaggggagttggtggcatctagttgctccgaggtacgttctcgggccgatcggttccgtagagctacgctctacgagttccaaggcggatggcgtcgccatccgtttcgatcaagctctcgcctacgcctcctactgctgaacgagcgctatcctacgacgtctgggcactcgttcagcaccagcccggcgggattcaccaaaggtagatggtcatcgactcccctcacg

SEQ ID NO: 15765 - RNA, 217 nt, unidentified
  source 1..217: mol_type = other RNA; note = Related to SAQH01000043.1; note = Mesorhizobium sp.
ggtggggcgctgaatttagcgttgcccgcaagcttcggcttgcgggcgtccacgttaggcaactaacagggcgagcgcgtcgcgctttgcttaggagaagcagccgccagtcgcgccggtggcgaagcggactaagggctctgcggggtctagggcgtccgctccgccatcgtctcgcgaagcgagtcaaagtaaatgacagtagcctcaccccacc

SEQ ID NO: 15766 - RNA, 219 nt, unidentified
  source 1..219: mol_type = other RNA; note = Related to JAFKIC010000112.1; note = Mesorhizobium sp.
gttgagggtgggacggtagcattttagcgttacttctactcagaagtgttccgtgtcgggtttccgacgtggcgggtgcgtcgcaccttgcttaggagaagccaacgccagtcgcgccggtggtggagtgaactcagttcttcacggagcctaaagcgttcactccaccatcgcctcgcggcggcgagccaaagtaaatgacttctatcccaccccact

SEQ ID NO: 15767 - RNA, 214 nt, unidentified
  source 1..214: mol_type = other RNA; note = Related to NZ_LNSC01000016.1; note = Sphingopyxis sp.
actgcgggcggggcgttaacagctagcgttgccgacgggtaaccgtcggtgtccatccggtaagccggcggccgagtgcttcgcattcggctggtaaaatcagccgccattcgcgccggcgagaagcaagacttcctctctcggggtctcaagccgtctcgcttctcgtcgtcacgggggtgaccaaagtagatgatcagcgcctcgccccacc

SEQ ID NO: 15768 - RNA, 207 nt, unidentified
  source 1..207: mol_type = other RNA; note = Related to NZ_JAGIOU010000001.1; note = Sphingomonas sp.
ggtggggcggtgacttctagccatgccgatcgttgatcggcctccacgtcgggaaaccggcagggaaagcgcgtcgcgcttacggaagaagcacccgccagacgcgccggtaggagaagggcccttcctctttcgtgatgactgcagggcttgccccttcccctatcgacccgcggatgcgccagagtagatgatctccgcctcacc

SEQ ID NO: 15769 - RNA, 222 nt, unidentified
  source 1..222: mol_type = other RNA; note = Related to NZ_CP016591.1; note = Tsuneonella dongtanensis
actgagggcggagcgctgagcatccagcttcccccggccgtaaaggccggaccaagtcgcggggttcccgcggcgggctggcgcgttgcgcttcgcctgggaaacggagtcgctgagatcgaccttagtgaagcgaacttccgctcttacgatgtctgggctcgtccgctccactatggcctccttacgggtcaaagtgaatgatcagcgcttcgccccacc

SEQ ID NO: 15770 - RNA, 222 nt, unidentified
  source 1..222: mol_type = other RNA; note = Related to NZ_WRPK01000013.1; note = Sphingomonas formosensis
actgagggcggagcgttgagcatccagcttcccccggccgtaaaggccggaccaagccgcggggttctcgcggcgggctggcgcgttgcgcttcgcctgggaaacggagtcgctgagatcgaccttagtgaagcgaacttccgctctgacgatgtctgggctcgtccgctccactatggcctccttacgggtcaaagtggatgatcagcgcttcgccccacc

SEQ ID NO: 15771 - RNA, 222 nt, unidentified
  source 1..222: mol_type = other RNA; note = Related to NZ_LMQP01000002.1; note = Sphingomonas sp.
gctgagggcggagcggtgagcatccagcctcccgccggccgcaaggccggtccatgccccggctcgtccggggcgggctggcgcgtcgcgcttcgcctgggagaaggtgtcgccgtgatcggccatggtgaagcggactccggcaccgacgaggactgggctcgtcccctccaccatcgcctcctatcgggtcaaagtggatgatcggcgcttcgccccacc

SEQ ID NO: 15772 - RNA, 236 nt, unidentified
  source 1..236: mol_type = other RNA; note = Related to LT629734.1; note = Agrococcus carbonis
ggtgaggcggctctacgaactagtgcagttgccgggttccggcaacgccggctcgggctggcagagtgtgcagcctgaggcgtccgcaggacgtgccggcaggagacctgtcggcatgagaaatcgaccgcttccggaagcagcgcgactctcgcttggttcctcggagcctcggcgcgagagccgcgcggcccctccggggccttatcgaaggtagccagtggagtcgcctcacc

SEQ ID NO: 15773 - RNA, 226 nt, unidentified
  source 1..226: mol_type = other RNA; note = Related to QKSO01000004.1; note = Curtobacterium sp.
ggtgaggggatcccgcgttagtcaagagtcggtaccgtcggtatcgatcgcccctagtagttgaaggggagccttgcggccgcttcgaatcggagattcggagcgtggaaaatctcccgcttccggaaggatcgcagcacccgcttccccctcgaagactcgggacgcgcgcgctgcgttgcccctccggggctatgaccaaaggtaacgatggaatcccctcacc

SEQ ID NO: 15774 - RNA, 258 nt, unidentified
  source 1..258: mol_type = other RNA; note = Related to JAINWC010000029.1; note = Agromyces mediolanus
ggtgaggaggctcgacgggactagcaaagcgccgccacgttacgtggcggccgtctctgcaaactcctgactgagttcacgagctagccagagaacgccgaacccggcgcatccgcgcgatactcgcgggtgagataaatctgtcgcttccggaaggatggcgaccctcgcttgcccctgcggcaggacttggacgcgagggccgcccgcccctccggggcactaatccaaggtagtcgccagtggagtctcctcacc

SEQ ID NO: 15775 - RNA, 230 nt, unidentified
  source 1..230: mol_type = other RNA; note = Related to NZ_RKQW01000003.1; note = Frondihabitans sp.
ggtgaggggaacgatcacggtcagaaaaagccggcaacgttggtgccggcactccgaagcatttgtcttcggcgtcgcgtgcgacgagggctaaatcgttgattgggcctgagcacaaactcacgattacgcagagcaagtcgaactcctctcggtcgctgtctcggtcgacgagcccgactgtccctccgggatcgatccaaggtgacctatgaaaacttcccctcacc

SEQ ID NO: 15776 - RNA, 251 nt, unidentified
  source 1..251: mol_type = other RNA; note = Related to PSVB01000001.1; note = Rathayibacter sp.
ggtgaggggaaggattcgggttagagaacgctcgcgaccatggtcgcgagccccacgcgcggcgctgccggaaggctgcaaagcacgatgcgtccatcggacgacgctcgccccggaggggtgggcgcggagaaaactggcgcttacggagacttccgagcgactcaaacaaagtcgcggtcttctccgttgagccgctcgcccctccggggcggacaactgaaggtaaccgttgaatctttctcctcacc

SEQ ID NO: 15777 - RNA, 254 nt, unidentified
  source 1..254: mol_type = other RNA; note = Related to JACFRS010000007.1; note = Bifidobacterium apousia
ggtgaggggaggtaagagtgatcttagcgatggttagcatatgctggcccgggagcggcgatttaaaactgctcgggaaagaagttcaaaagcccagaaacgcatttattagtttctgcgtacgatctcacgaacgcctgaaggtggagggttcaagcagcctacgaagtgcgactggctgctctcgagaaccctccacattcgctacgctctaccataggtcaaacagtaagtgatctctttctctcctcatc

SEQ ID NO: 15778 - RNA, 256 nt, Micrococcus sp.
  source 1..256: mol_type = other RNA; note = Related to NRSP01000001.1; note = Micrococcus luteus
gatgagggaggcttatttttgcctagtgttcccgaggatgagcaacttcctcggaggcggagttgaagtgattgtttcacataacttcgtatacagacgcaccccgctctgtattgggcctaaggagcttgggcctacggctaacgactcgcctcttggtgaatcggcggctcggccttacgtatcgttggcctttgcgagccgccgatgcgccttcggcgctgattcaaggtaggtaagatgagcccccctcacc

SEQ ID NO: 15779 - RNA, 221 nt, Pseudomonas fluorescens
  source 1..221: mol_type = other RNA; note = Related to NZ_JSAL01000022.1
ggcccacagaggctagtacgttagagtgtagtcgctctcaaggttaaggatttcgataaccgaatatcgcaaccatcagcggtgaagcgtgctgatggatgcgatgctccgccgcttcgcggctccgcagtcgaaaggcgcacaaaagcgggctccgcccgcttccgcacgcctttcgactaaagagcccgcttagtttagaaggtagtcatctgtgggct

SEQ ID NO: 15780 - RNA, 238 nt, Pseudomonas sp.
  source 1..238: mol_type = other RNA; note = Related to NZ_CP010979.1; note = Pseudomonas putida
tgcccgcagaagctagtatgctggagtgaagtcgctcccaaggttaaggttcatgataaccgatattgcaaacaccggcgatgaagcataccggcgcttgcaatgctacaacgcttcgcgtttccgcaaaccttgaggtgcacgaaagcgggcttcgcccactttcgcacacctcaaggtttagagcgcaagtctaaaagcaaaagcggattggaaaacaggtagctatctgcgggca

SEQ ID NO: 15781 - RNA, 217 nt, Pseudomonas sp.
  source 1..217: mol_type = other RNA; note = Related to NZ_UTCV01000052.1; note = Pseudomonas viridiflava
tgcccacagaggctagtacgatggagtgaagtcgctcccctggttaaggtgttcgataaccgatattgcatccaccggcggtgaagcataccggcggatgcaatgctacaacgcttcgcgtttccgcaaaccgcaaggcgcacaaaagcgggcttcgcccactttcgcacgcctcgcggtttagagcgcgagtctagaaggtagtcatctgtgggtt

SEQ ID NO: 15782 - RNA, 217 nt, Pseudomonas sp.
  source 1..217: mol_type = other RNA; note = Related to JAEKDB010000004.1; note = Pseudomonas haemolytica
tgcccacagaggctagtacgttggagtgcagtcgctccctaggttaaggtgtccgataaccgatattgcaaccactggcggtgaagcataccagtggctgcaatgctacaacgcttcgcgtttccgcaaaccgcaaggcgcacaaaagcgggcttcgcccacttccgtacgcctcgcggtttagagcgcaagtctagaaggtagccatctgtgggct

SEQ ID NO: 15783 - RNA, 219 nt, Pseudomonas sp.
  source 1..219: mol_type = other RNA; note = Related to NZ_JAGYGI010000002.1
tgcctgcagaggctagtacgtaggagtgtagtcgctccccgggtcaggttcccgataaccaagaatcatgcgctcagcggtgaagcatgctgaacgcatgatgcttacaaaacgcttcgcgttttgacgcagtaatctccagcgagaattccgcttcgcgcaattatcactggagattatctgaccatgctaaagtatagaaggtagcctctgtaggtt

SEQ ID NO: 15784 - RNA, 219 nt, Pseudomonas sp.
  source 1..219: mol_type = other RNA; note = Related to NZ_LHUU01000009.1; note = Pseudomonas protegens
cgcctacagaggctagtacgtaggagtgtagtcgctccccgggtcaggtttctgataaccaagaatcatgcgtccagcggtgaagcgtgctgaacgcatgatgctttcaaaacgcttcgcgttttgacgcagtaatctccagcaagaattgcgcttcgcgcaattatcactggagattatctggccatgctaaagtatagaaggtagcctctgtaggtt

SEQ ID NO: 15785 - RNA, 230 nt, Pseudomonas fluorescens
  source 1..230: mol_type = other RNA; note = Related to CABVIS010000011.1
tgcctgcagaggctagtacgttggagtgcagtcgctccccgggtaaggttcccgataaccaagttatagtaactccagcggtgaagcgtgctgaagttactatacttacaaaacgcttcgcgttttgacgtagtccactccatccgcaatttcgctgcgcgaaattacgaatggagtaaacaaagtcaaaagcaaagctgctaaagtacagaaggtagcctctgcaggta

SEQ ID NO: 15786 - RNA, 230 nt, Pseudomonas sp.
  source 1..230: mol_type = other RNA; note = Related to NZ_JAIWYL010000001.1
ggcctgcagaggctagtacgttggagtgtagtcgctccccgggtaaggttcccgataaccaagttgtagtgacttcagcgatgaagcgcactgaagccactacacttacaaaacgcttcgcgttttgacgttgctccacccatccgcaatttcgctgcgcgaaattacagatgggtaaaacaaagtcaaaagccaagctgctaaagtaaagaaggtagcctctgcaggtt

SEQ ID NO: 15787 - RNA, 229 nt, Pseudomonas sp.
  source 1..229: mol_type = other RNA; note = Related to NZ_CP027656.1; note = Pseudomonas chlororaphis
tgcctgcagaggctagtacgatggagtgaagtcgctccccgggtaaggttcccgataaccaagttgtagtaacttcagcgatgaagcgcactgaagttactacacttacaaaacgcttcgcgttttgacgtggtccatctattcgtaatttcgctgcgcaaaattacgaatagataaaacaaagtcaaaagcaaagcagctaaagtacagaaggtagcctctgcaggtt

SEQ ID NO: 15788 - RNA, 215 nt, Citrobacter sp.
  source 1..215: mol_type = other RNA; note = Related to CP045205.1; note = Citrobacter telavivensis
agcttacagaagctagtatgttggagtgtagtcgctccccgaactaaggttcgcgatagccaacactcaaggatgattttgtaccaaattcatccttgagttgacaaaaggactgcgtcctttgtgtcgggatcagaacacaataaaattagcgtatcgcaaattttattgcattctgatctgttgcaaagtattgaaggtatcttctgtaagct

SEQ ID NO: 15789 - RNA, 217 nt, unidentified
  source 1..217: mol_type = other RNA; note = Related to NC_012691.1; note = Tolumonas auensis
ggcttacagaagctagtacgttagagtgtagtcgctctccgggataaggctcccgttaaccaacgtacaataactattcaaaaagcgaatagttattgtaccgtaccaaaaggactccgtcctttgtggtagctcttaagttaagaaaatattgcgtgtcgcaatattttcttacttgaagaggggttgcaagtaaagaaggtagcttctgtaagct

SEQ ID NO: 15790 - RNA, 217 nt, unidentified
  source 1..217: mol_type = other RNA; note = Related to JABSQN010000005.1; note = Piscirickettsiaceae bacterium
ggcttgcagaagctagtatgttggagtgtagtcgctccccgaggtaaggccctcgttaaccatggttccataaagttgctatcgcatttatggtacttcaagaaatagctatcgctattcttgaaatagcataaaggagcctgtttttatgcgcatccgcataaaagcaggagcctttatgcttatgctaaagtatagaaggtagcttctgtgggtc

SEQ ID NO: 15791 - RNA, 218 nt, unidentified
  source 1..218: mol_type = other RNA; note = Related to NZ_CP036266.1; note = Gimesia chilikensis
aacttacagaagctagtacggtaagagtgtagtcgctctcaagggtaaggtgcccgttaaccatgtaccaccaaaagagagctaaagatctcttttggtggtgccatcgataaactcgtttatcgatggcagtcacacaagctcataaagtttgcgcgatcacaaactttacgatcttggagactgcatgcaagtccagaaggtagcttctgtaagtt

SEQ ID NO: 15792 - RNA, 202 nt, unidentified
  source 1..202: mol_type = other RNA; note = Related to NZ_CP081832.1; note = Idiomarina abyssalis
ggctctaagaagctagtagttttgagcgagtcgctcatgtggctgaggtttactttaaccgatgcaagaaaagcaaatgatgcaaaattttgccagcaaaattttgcatcaccactgaatcattaacaatagtcgcgtttcgcgactcttgcaaatgattcagtggtgtgcacgcaagtatagaaggttgtttcttagagcc

SEQ ID NO: 15793 - RNA, 233 nt, Pseudomonas sp.
  source 1..233: mol_type = other RNA; note = Related to CP049161.1; note = Pseudomonas aeruginosa
agcttacagaagctagtacgttggagtgtagtcgctccccgggctaaggtgcccgttagccaagacatacaaaagcaaaagcgaaaggaagcttttatttttgtatgtacctaaagatttgaaaaaagactcaaatctttaggtagtactaaaatcaatcactttttgcgcacgcgcaaaaagcaattgatttatagtacgcttgcaagtacagaaggtagtttctgtaagct

SEQ ID NO: 15794 - RNA, 238 nt, unidentified
  source 1..238: mol_type = other RNA; note = Related to JAENMP010000010.1; note = Serratia fonticola
ggcttacagaagctagtatgttagagtggagtcgctctcatgattaggtccgggttaacccagttcatgggaattgcaaaattccgcaattcccatgatagtgataataaaacctcgcagcgaacgttttcgctgctcgcttttattatctggattgaatcagcaaatttttgcgttttcgcaaaattttgccgcttcaatccacaggctaaagtattgaaggtatcttctgtaagcc

SEQ ID NO: 15795 - RNA, 238 nt, unidentified
  source 1..238: mol_type = other RNA; note = Related to NZ_JPRU01000003.1; note = Buttiauxella noackiae
ggcttacagaagctagtatgttagagtggagtcgctctcatgataaggtctgggttaacccagttcatggaaattactgtaaccagtaatttccatgatgtggataataaaatctcacagcgaattttttcgctgctcgattttattatctggattggaccagcaaatttttgcgttttcgcaaaattttgccgtcccaatccacaggctaaagtattgaaggtatcttctgtaagcc

SEQ ID NO: 15796 - RNA, 238 nt, unidentified
  source 1..238: mol_type = other RNA; note = Related to NZ_ARWD01000001.1; note = Serratia plymuthica
ggcttacagaagctagtatgttagagtggagtcgctctcatgattaggttggggttaacccagttcatgggaattgcaaacttccgcaattcccatgatatgaataataaaaccgcacagcgaagtttttcgctgcacgcttttattatctggattgaatcagcaaatttttgcgttttcgcaaaattttgctgctccaatccacaggctaaagtattgaaggtatcttctgtaagcc

SEQ ID NO: 15797 - RNA, 238 nt, unidentified
  source 1..238: mol_type = other RNA; note = Related to NZ_JQHM01000002.1; note = Pectobacterium betavasculorum
ggcttacagaagctagtatgttagagtggagtcgctctcatgattaggtctgggttaacccagttccaaggaattgcaatgctttgcaattccttggataatgataataaagcttcgcagcgaaacatttcgctactcacctttattatctggattgaatcagcaaatttttgcgatttcgcaaaattttgctgctccaatccactcgctaaagtattgaaggtatcttctgtaagcc

SEQ ID NO: 15798 - RNA, 239 nt, unidentified
  source 1..239: mol_type = other RNA; note = Related to CP026651.1; note = Morganella morganii
agcttacagaagctagtatgttagagtggtgtcgctctcatgattaggttcgagttaacccagttcgtgaaaattacaaaaaaatttgtaattttcacgatggtgacaacaaaaactcgtagcgaaattttcgctactcctttttgttgtctggattgtatcggataattttcgcgtattcgcaaaaattatccgccccaatccacaggctaaagtattgaaggtatcttctgtaagct

SEQ ID NO: 15799 - RNA, 235 nt, unidentified
  source 1..235: mol_type = other RNA; note = Related to CWJI01000001.1; note = Yersinia intermedia
ggcttacagaagctagtatgttagagtggtgtcgctcactagtttaggatcgcgttagcccagtccgtaaacctctcgttgttcggtttacggaagtgggcaatataaagctcgtagctcgttactcgctactcactttatattgccggttcgatccagcaattttttgcgttatcgcaaaaagttgctgcctcgaaccactggcttaaagtattgaaggtatcttctgtaagtc

SEQ ID NO: 15800 - RNA, 238 nt, unidentified
  source 1..238: mol_type = other RNA; note = Related to NZ_FXUX01000002.1; note = Pantoea agglomerans
ggcttacagaagctagtatgttagagtggagtcgctctcatgttaaggctggggttaacccagtccatgagaattactgaagtcagtaattctcatggggttgaaaataaattctcatagcgaagttattcgctattcgaatttatttccgggattaggtcagcaaatttttgcgctttcgcaaaattttgctgcccaaatccactggctaaagtattgaaggtatcttctgtaagtc

SEQ ID NO: 15801 - RNA, 210 nt, unidentified
  source 1..210: mol_type = other RNA; note = Related to NC_009659.1; note = Janthinobacterium sp.
ggatagccagtagctagtgttaaggagtggtgtcgctccggttgttcaggctgaatttttccagcccctgcaaatttaaacatcaaatttgcaggaatgtgaaattggctacgccaattatcactgatcacaacactaaatttgttcgttccgaacaaatgttagcgttgtgatcgcagctaacgtacagtaggtagcgttgtactatcc

SEQ ID NO: 15802 - RNA, 209 nt, unidentified
  source 1..209: mol_type = other RNA; note = Related to NZ_AJVC01000002.1; note = Herbaspirillum sp.
aagaggtagtagctagtgttaaggagtggtgtcgctccggttgataaggtgaaactatgcctgcgcccgaaaatttattctaaatttgtcggggggagactacgattggcaatgccaatcgtagtctcatctgaaccttacttttgttcgtctcgaacaaaagtaatcttcagatttcagctaacgtacagtaggtagcatttcctctt

SEQ ID NO: 15803 - RNA, 204 nt, unidentified
  source 1..204: mol_type = other RNA; note = Related to JAGPWD010000023.1; note = Massilia sp.
agtgcgcagtagctagtgtttaggagcggtgtcgctccggttgctgaggcggaaatatgccagcaccgggaaattggcttcgccattttcccggtgtgaaattggcttcgccaattatcacgtatttgattgactttgtaggtcgttccgacctacaaagccactctaatatgcagctagcgtacagtaggtagctccagcaca

SEQ ID NO: 15804 - RNA, 217 nt, Chromobacterium sp.
  source 1..217: mol_type = other RNA; note = Related to MUKQ01000009.1; note = Chromobacterium violaceum
tgagggagctgctagtgttaaggagtggtgtcgctccggttgctaaggctgatcttcaccagacaccgacaaatcactagaagtgatttgtcgggagcaagattgctgcagagcaactgcagcaatcgttgctagcaacaacgcatcatttgttcgaaccgaacaaatgatgtgttgttactgcagctaacgtctagttcggtagcaggctccctct

SEQ ID NO: 15805 - RNA, 220 nt, unidentified
  source 1..220: mol_type = other RNA; note = Related to PYUJ01000108.1; note = Serratia sp.
ggcttgtagaagctagtgcgttggagtgtagtcgctccttggttaaggtccattttaaccatcaactatggagaaattttgcacgcaaaattcctccatagtcgcttagaatagctacgctattcacgcggttctttcaagctcaagatgtcgcgttccgcaacatcttgagtttgaagagaacaggatgcaaaagtacagaaggtagattctacaagcc

SEQ ID NO: 15806 - RNA, 221 nt, Proteus sp.
  source 1..221: mol_type = other RNA; note = Related to CP047112.1; note = Proteus mirabilis
ggcttgtagaagctagtgcgttggagtggagtcgctccttggttaaggttaactttaaccattaccaatagaatcaatttgtacacaaattgattctattgggtcgcttagaatagctatgctattcacgcggttctttcaatctcaagattcgcggcccgcgaaatcttgagctcgaagagaacgaaatgcaaaggtacagaaggtagattctacaagcc

SEQ ID NO: 15807 - RNA, 219 nt, unidentified
  source 1..219: mol_type = other RNA; note = Related to NZ_JAKMAJ010000005.1; note = Brenneria sp.
ggcttgtggaagctagtgcgttggagtgtagtcgctccttggttaaggttcactttaaccaaagaccagacaagaattttgtaaccaaaattcccgtctggtcgcttcgaatagctatgctattctcgcggttctttcaagaacgagatgtcgcgtctcgcaacatctcgttctcgaagagaacgaactgcttagtatagaaggtagttttcacaagcc

SEQ ID NO: 15808 - RNA, 217 nt, Enterobacter sp.
  source 1..217: mol_type = other RNA; note = Related to CP084692.1; note = Enterobacter mori
ggcttgtgagtgctagcacgatggagtgtagtcgctccttggttaaggctgcctttaaccacagactcagcgtgagttttgttccaaatctcacgctgagtcgctccgaatagcgttgctattctacgcggttcatccaagttcaagatgttgcgatccgcaacatcttgttcttggaagaacggagtgtcgagtaagaaaagtagcctcacaagcc

SEQ ID NO: 15809 - RNA, 205 nt, Enterobacter sp.
  source 1..205: mol_type = other RNA; note = Related to JAEKKB010000005.1; note = Enterobacter asburiae
gacttgtagaaactagcacgttggagtgtagtcgctccttggttaagggtcactttaaccacgactatacggataactccgtatagtcgcttcgaatagcgttgctattctcgcggttctttcaaggtcgagatgtcgcgtcacgcaacatctcgctcttgaagagaacttaggtgtcaggtatagaaagtagtttctacaagtc

SEQ ID NO: 15810 - RNA, 211 nt, unidentified
  source 1..211: mol_type = other RNA; note = Related to JAHVIK010000003.1; note = Halomonas denitrificans
agtttgcaggagctagtacgtaggagtgtagtcgctccctggttaaggttcgcgttaaccaatcacttacaaactcaaagagcgagactttgtaagtgaagggaaaatggcttcgccatttgtcccgcagtcaatatctttgatattgcgccagcgcaatctaaaagatattgacagagttgcatagtaaagaaggtagctcctgcaaact

SEQ ID NO: 15811 - RNA, 217 nt, Vibrio sp.
  source 1..217: mol_type = other RNA; note = Related to NZ_FRFG01000024.1; note = Vibrio quintilis
agcttgcggaaactagcatattggagtgtagtcgctctgaagtttacgtcgataataacctagaactaaacacaaatttgcaagcaaaagtgtgtttagttcaccgaatagcattcgctattcttggtggcatcggttttgttctaaatattgcgtatcgcaatatttagaacaaaaccgatgagtagcaaagtatagaaagtagtttccgcaagct

SEQ ID NO: 15812 - RNA, 218 nt, Vibrio sp.
  source 1..218: mol_type = other RNA; note = Related to DADXPV010000013.1; note = Vibrio cholerae
agcttgcggaaactagcatagtagagtgaagtcgctctcaagttaaggctaataatagcctagaactaaacacaattttgcaagcaaaagttgtgtttagtaagccgaatagcattcgctattcttggctgcatcatttttgttctaaatattgcgtatcgcaatatttagttcaaaattgatgagtagcaaagtatagaaagtagtttccgcaagct

SEQ ID NO: 15813 - RNA, 210 nt, Vibrio parahaemolyticus
  source 1..210: mol_type = other RNA; note = Related to ABBBBM010000001.1
ggcttgtagaagctagtacgttggagtgtagtcgctctcaggttaaggtgaacgttaaccattatacttacgattttcggaaaagataaaaatcgtaagtagcatgaatagcttcgctattcttatggcattgaaatctcccatatttcgcgagcgaaatctgaaagattttaatgcaatgcatagtttagaaggtagcttctacaagtc

SEQ ID NO: 15814 - RNA, 212 nt, unidentified
  source 1..212: mol_type = other RNA; note = Related to NZ_MAJU01000008.1; note = Aliivibrio logei
agcttgcagaagctagtatgtaggagtgtagtcgctctcaggttaaggtagatgttaaccacaacttacaattttcaaaagagcgcgaaaattgtaagttgccgtgaatagcttcgctattcattcgggcattaaagctcaaatatcacgcaagcgcaatattcaagctttaatgataatgtgcaaagtatagaaggtagcttctgcaagct

SEQ ID NO: 15815 - RNA, 210 nt, unidentified
  source 1..210: mol_type = other RNA; note = Related to NZ_CP010423.1; note = Pragia fontium
aacctattgaagctagtacattagagtggagtcgctcttaggttaaggtagccgttaaccgtgtatctaaaatttcttgcagaaattttagatacagataggtaaataactttgttatttaccattaaaaacgtacaactttcgcatacgaaagttgtaaatttttaatgatgattgaacgcgtagtatagaaggtagcttcaataggta

SEQ ID NO: 15816 - RNA, 189 nt, unidentified
  source 1..189: mol_type = other RNA; note = Related to NZ_PNCO02000001.1; note = Pseudoalteromonas galatheae
ggcttgtagaagctagtacattagagtgaagtcgctctttggttaaggtgagctttagccacatcaaatataaaaaaccctgaatagcttcgctattctagttctgtatttaaaacttgaatgtttcgcgagcgaaacatgaaagttttaaatacttgtgcatagtaatgaaggtagcttctacaagct

SEQ ID NO: 15817 - RNA, 214 nt, Vibrio sp.
  source 1..214: mol_type = other RNA; note = Related to LJTE01000008.1; note = Vibrio alginolyticus
agcttgcagaagctagtacgttagagtgtagtcgctctcaggttaaggttttcgttaaccacattacttacaattttcgaaaagataaaaattgtaagtaagctgaatagcttcgctattcttaacgcgaacatgaaaatctcgaatattccgcaagcgaaatctacgagtttttcatgttagtgcatagtatagaaggtagtttctgcaagct

SEQ ID NO: 15818 - RNA, 212 nt, Vibrio parahaemolyticus
  source 1..212: mol_type = other RNA; note = Related to AAXXVD010000006.1
agcttgcagaagctagtacgttagagtgtagtcgctctcaggttaaggtttccgttaaccacggtacttacaattttcgaaaagataaaaattgtaagtaacatgaatagcttcgctattctataggaacatgaaaatctcgaatattccgcaagcgaaatctacgagtttttcatgttcgtgcctagtatagaaggtagtttctgcaagct

SEQ ID NO: 15819 - RNA, 219 nt, unidentified
  source 1..219: mol_type = other RNA; note = Related to NZ_LXEP01000041.1; note = Buttiauxella gaviniae
agcttgtagaggctagcacaatgggagtcaagttgaccccttggttaaggttacctttaacctcagtactaagttttgcacttcgtttaaaacttagtactatccacataaattcaagaatttatgtggatacaaaatttataaagcaaaatttgcgctaacgcaaattttctttataagattatggatcgcaagtatagagagtagcctctacaagca

SEQ ID NO: 15820 - RNA, 219 nt, Salmonella sp.
  source 1..219: mol_type = other RNA; note = Related to AAMMPP010000001.1; note = Salmonella enterica
agcttgtagaggctagcacagtgggagtcaagttgaccccttggttaaggttatctttaacctcagtactaagttttgcgctttgcttaaaacttagtactatccacataaattcaagaatttatgtggatacaaaatttataaagcaaaatttgcgctaacgcaaattttctttataagattatggatcgcaagtatagagagtagcctctacaagca

SEQ ID NO: 15821 - RNA, 244 nt, unidentified
  source 1..244: mol_type = other RNA; note = Related to WQRG01000008.1; note = Leclercia adecarboxylata
tgcttgtaaaggctagtataaaaggtgtcaagttgaccctaaggttaaggctatctttaacctcagtactaagtttttactttgtaaaaacttagtactactctcacaaattcatgaatttgtgagagtacataaattacaaagcgaaattttgcgctaacgcaaaatttactttgtaatattatggattcgcaagtgtaaaatattaatttaaagatcaaagaaagagtagcctttacaagca

SEQ ID NO: 15822 - RNA, 190 nt, Acinetobacter sp.
  source 1..190: mol_type = other RNA; note = Related to JAKUKP010000004.1; note = Acinetobacter pittii
gtctattagggattagtatattgaagtgtagtcgcttcttgtgttcaggggtcattgacctcatacctatataaattttttcaaaatttatataggtatcgatcaagcgttgcttgaatcgattctatcaacaaacccgttggtatttgttgatagaagtagcaagtattttgagtaatctctaataggc

SEQ ID NO: 15823 - RNA, 190 nt, Acinetobacter sp.
  source 1..190: mol_type = other RNA; note = Related to JACXZP010000005.1; note = Acinetobacter towneri
acctgttaggggttagtatattgaagtgatgtcgcttctcgtgtttaggggtcattgaccttgtacctatataaattttttcaaaatttatataggtaccgatcaagctttgcttggatcggttctatcaacaaaaccctaggttttttgttgatagaaaagcaagtattttgagtaatccctaataggt

SEQ ID NO: 15824 - RNA, 189 nt, Acinetobacter sp.
  source 1..189: mol_type = other RNA; note = Related to NZ_CP031716.1; note = Acinetobacter wuhouensis
acctgttagggattagtatattgaagtgatgtcgcttctcgtgtttagggttcattgaccttgtacctatattaattttttcaaaattaatataggtaccgatcaagctttgcttggctccgtcctatcaacaaaacccttggttttgttgatagaaatagcaagtattttgagtaatccctaataggt

SEQ ID NO: 15825 - RNA, 205 nt, Acinetobacter sp.
  source 1..205: mol_type = other RNA; note = Related to CP077835.1; note = Acinetobacter baumannii
tgcctgtaaggattagtattttgaagcgagtcgcttctgacgttaacgggtctttgaccttaactctctattaaatcaaagatttaatagagaggggcgaacagctgctgctgattcgcagtaagaaaagaagatttcttttgattgctatcaaaataaatttcttttcttacaaagcaagtaatttgagtaatccttacaggtt

SEQ ID NO: 15826 - RNA, 206 nt, Acinetobacter sp.
  source 1..206: mol_type = other RNA; note = Related to NZ_VPDZ01000001.1
agcctgtaaggattagtattttgaagcgagtcgcttctaatgttaacgggtctttgacctatactctctattaaatcaaagatttaatagagagggggcgaacagctgctgctgattcgcgtaagaaaataagatttcttttgattgctatcaaaataaacttcttttcttacatagcaagtaatttaaggtaatccttacaggtc

SEQ ID NO: 15827 - RNA, 199 nt, Acinetobacter sp.
  source 1..199: mol_type = other RNA; note = Related to CP035936.1; note = Acinetobacter cumulans
cacctgtaaggattagtatgttgaagtgtagtcgcttctagtgttaacgggtctatgacctttactctcattaaatcaaagatttaatgagagggtcgaacagcatttgctgattcgaagtaagaaacaaatttatttggatgtttcccaataaatttgtttcttacaaagcaagtaatttgagtaatccttacaggtt

SEQ ID NO: 15828 - RNA, 209 nt, Acinetobacter sp.
  source 1..209: mol_type = other RNA; note = Related to NZ_CP032134.1; note = Acinetobacter chinensis
cgcctatagagattagcaaattgaagtgaagtcgcttctagtgttaaggtctcaatgacctggacttaatctcgaaaatttatcaattttctcgtttaagtcgtgaacagctatcgctgattcacagtgataaacaaaatagcttttgctctacgcaaaatcaattttgtttatcacagagcaagtaaagaaagtaatctctataggtt

SEQ ID NO: 15829 - RNA, 224 nt, unidentified
  source 1..224: mol_type = other RNA; note = Related to NZ_PIPJ01000004.1; note = Aliidiomarina iranensis
tggctctcgagcctagttacctgtaaaagagtgcagtcgctctgggcttaaggtcagttttagcctcggtaaaagacgactccttaaaaatgttccatttttaaggagtgctcgcaccgctgcgcggtgactcgctggaaagattatcagtctttccgcgcgagcacggaaagactgataatctttccgcgggagcaaaagtttcgatgtaggatcgagagcca

SEQ ID NO: 15830 - RNA, 204 nt, unidentified
  source 1..204: mol_type = other RNA; note = Related to NZ_JAKZGR010000005.1; note = Belliella kenyensis
aggtggaatagaaacaagcattaaggaagcggtgtcgcttccgagaggtaaggctatatttaacctcggtcaaaaatcgcgatttttgacagctcactaggcaaagcctagtttcgctcacaataaacaaagttttattggagcgaactccaataaaactttgtttattgtgagagctgcgaatagaaagttgtttgaccacct

SEQ ID NO: 15831 - RNA, 202 nt, unidentified
  source 1..202: mol_type = other RNA; note = Related to HF992628.1; note = Prevotella sp.
ggaaaatagaaactagcatttaggaagtggtgtcgcttccgaaggctaaggttaattttagcctcagtagatagttcagagaactatctacagctcacttggcacagccaagattcgcattcaataaatattattttattgaagcgagctccaataaaataatatttattgacgagctgacgaatagaaagtagttttatcc

SEQ ID NO: 15832 - RNA, 215 nt, unidentified
  source 1..215: mol_type = other RNA; note = Related to NZ_JAAKEL010000031.1; note = Dysgonomonas sp.
aggtggaagaaactagcaaataagaagatgtagtcgtcttcgttgataaggtttattttagcctcagtgcatcaatgacccttcagctcattgatgcacagctcacaagacaagcatgtcttgattcgctccaataactaagtagtttattggagtgtccaataaactacttagttattggaacgagctacgagaagaaagtagtaaatccacct

SEQ ID NO: 15833 - RNA, 213 nt, unidentified
  source 1..213: mol_type = other RNA; note = Related to JAIPGO010000099.1; note = Candidatus Cloacimonetes bacterium
aggtggttatattctagtatttatgaagtgtagtcgcttcgatcgttaaggctgattttaacctctgcataataatatcggtagatattattatgcacgctccctttagcagagctaagaatcgctcactcaggcacaagctttgaggagcgacctcctcaaagcttgtgcctgagtgagagctaaagaaaagaaaagtagaataagccacct

SEQ ID NO: 15834 - RNA, 219 nt, unidentified
  source 1..219: mol_type = other RNA; note = Related to NC_015496.1; note = Dokdonia sp.
aggtggtatagaaactagcattaaggaagtgtagtcgcttccgaaggttaaggctaattttaaccttgagcataacaaatgaatgaaaaattcatttgttatgctcgcgaactgggcagagcccagattcgcgcacacaaactaatgttttgtgtcgcgaacaacacaaaacattagtttgtgtgaaagctgaagaatagaaagtagttctcaccacct

SEQ ID NO: 15835 - RNA, 209 nt, unidentified
  source 1..209: mol_type = other RNA; note = Related to NZ_JPRI01000002.1; note = Chryseobacterium vrystaatense
tggttgaaaaaactagcattaaggaagtgtagtcgcttccgaaggttaaggtgaattttaacctgtgtcataataaaatcaaaaattttattataacagctcactaagcagagcttagattcgctcacacacaaataagttttgtggagcgagcaccacaaaacttatttgtgtgtgaatgcttacgaaaagaaagtagttttccaccc

SEQ ID NO: 15836 - RNA, 213 nt, unidentified
  source 1..213: mol_type = other RNA; note = Related to JAGPCT010000083.1; note = Saprospiraceae bacterium
tgatgggtaagaaacttgcacttagaaggtgtagtcgccttcggccgaattcaggctaaatttagccaatgggctaaagtagaaataactttagcccctgttcgctcagcagagctgaggctcgctccacttaattacctcaaaagtggagcgaactccacttttgaggtaattaagtggattgctaaagcataagaaagaagtcgcccatca

SEQ ID NO: 15837 - RNA, 222 nt, unidentified
  source 1..222: mol_type = other RNA; note = Related to NZ_JACVMN010000002.1; note = Flagellimonas sp.
tgatggctaaaagaacttgcatttagaaggtgtagtcgccttcgtgaactaaggctagatttagccattgggaataaaattaaaatcagagattgtttattttattccggttcactcatcaaagatgagattcacgcacttaattaatatttaagtgtagcgtctccacttaaatattaatataagtggaatgctaaagatgaagaaagaagtttgccatca

SEQ ID NO: 15838 - RNA, 196 nt, unidentified
  source 1..196: mol_type = other RNA; note = Related to NZ_CP047897.1; note = Nibribacter sp.
aggtggaaaagaaactagcatattggaagcgagtcgcttcttgagttaaggttagatttaacctagggcaaagcaagtttgccagtttgctcggcagggccgagacaaactctcagtaatgatattattcgtcgtatcctccgaataatatcattactgaggttagctaaagtaaagaaagtagttttatccacct

SEQ ID NO: 15839 - RNA, 223 nt, unidentified
  source 1..223: mol_type = other RNA; note = Related to PCOU01000016.1; note = Chryseobacterium sp.
aggtatagaagaaactagtacaattgaagtgaagtcgcttcgtaggataaggtacactttatcctttacccttaaatacaaaattagaaattttttatttaagggttctcgctcagcagagctgagactcgcggtgattaatccaaattattttgtagattactccaaaataatcagtattaatcacaaagctaaagttaagaaagtagttaacttattacct

SEQ ID NO: 15840 - RNA, 223 nt, unidentified
  source 1..223: mol_type = other RNA; note = Related to JACHTC010000027.1; note = Myroides sp.
ggcacacaagaaactagtacaatcgaagtgaagtcgcttcgtaggataaggtatattttatcctctacctttaaattaaaaatcagagattttgaatttaaaggttctcgctcagcaaagctgagactcgcagtgattaatccatattattttggagaatactccaaaataatccgtcttaatcacatagctaaagttaagaaagtagtaactaattagtgtc

SEQ ID NO: 15841 - RNA, 219 nt, unidentified
  source 1..219: mol_type = other RNA; note = Related to NZ_NFHW01000007.1; note = Butyricimonas sp.
acaataaagaaactagcacatttgaagtgaagtcgcttctaaggttaaggtattctttaacctctactcttaataagcaaatcaaagatttgcttattaagagcgttcactcagcacagctgagattcacagtgattaattcagattattctggagcatactccacaataatcggccttaatcacagagcttacgttaagaaagtagtttaattaatgt

SEQ ID NO: 15842 - RNA, 193 nt, unidentified
  source 1..193: mol_type = other RNA; note = Related to JAFWZH010000322.1; note = Clostridia bacterium
agaaactagcaagtaggagtgtagtcgctccgatccgttaagggtttgatttaccccaactgaaaccatccagtattcagcgggcttgaacctatggttcaagctgtcaataattgctaaaatttatggtcgtaaccataaatttaatcaattattgacagggctcacgtaaagaaagtagtttatatcatct

SEQ ID NO: 15843 - RNA, 186 nt, unidentified
  source 1..186: mol_type = other RNA; note = Related to CP042465.1; note = Prevotella copri
gaatgttggaaactagaaaataggagtgtagtcgctccggcagggttaggctttgctttacccatcgaacaccacggtgttcgaagtcaaagtctatcgactttgacagcaacagattcatcaaaaatgcgatgcatttttaacgaatctgttgcaggcgttgttaggaaagtagttccagtaata

SEQ ID NO: 15844 - RNA, 243 nt, unidentified
  source 1..243: mol_type = other RNA; note = Related to WTAE01000072.1; note = Sulfurovum sp.
agaaaagcattagtacagaaaagagtgtagtcgctcttgattcaggttaattttaaccaccagtaggaaactttatgtcttcactcagtcgctgttcgctcgttcgttcagaaataaagtttcctactgaactccattccattacgtgcaaaactacaagaagacttcttatcgcgtccgataacaagtattcttgtacttttgagatgcgttaccgagaggtaagggtaatgcttttcttct

SEQ ID NO: 15845 - RNA, 193 nt, unidentified
  source 1..193: mol_type = other RNA; note = Related to NZ_CABVRY010000015.1; note = Aliarcobacter butzleri
cgatagtgtcagtaagtgtaagtgaagtcgcttaccactgagaggttatttttatcctttggtattaatttttcaaattaatactcggctacggataaatccttcgctcattatataaataaatcttattgattcgttaatcaataagatttattttataatgacagtaatacaagaaaaggtggcactatct

SEQ ID NO: 15846 - RNA, 176 nt, unidentified
  source 1..176: mol_type = other RNA; note = Related to JABMQT010000738.1; note = Lentisphaerae bacterium
ggcttctcgcattagcacgttgaggtgaattcgcctcacaggttaacggtagcgttagctccactggttgtggaacacaaccagtgcttcctcctgacggaggattgcagagatctagctcacatgcatgtgagctagaccccggagttctgctgagtttagtactgcctgaagcg

SEQ ID NO: 15847 - RNA, 191 nt, unidentified
  source 1..191: mol_type = other RNA; note = Related to NVRR01000003.1; note = Sneathiella sp.
gtgcgctagaggttagcacaaagaggtgtattcgcctcagggttaaggttcgctttaaccacttcgtagaaacctaagtgggcttctacgaggcttctctaacgagatgcttgccatagtcttaatcgttttggacgatttagctatgacaaggaatgtaaacattgaaaaggaagtagcttttagcgcac

SEQ ID NO: 15848 - RNA, 217 nt, unidentified
  source 1..217: mol_type = other RNA; note = Related to JAGQOP010000117.1; note = Phycisphaerales bacterium
gggtagcaaaatgctagtacaaaggagtgaagtcgctccgcggattaaggttgacgttatcctacgggacaagctgggataaaactccagcttgccccagcgatctcgatattcatcgaggatcgctcgcctaacatgcctgcgcactgcgcgagcgcacctactcagcatgttaggcggtagcgtgcgaagcacggatagaaggtagcggctaccc

SEQ ID NO: 15849 - RNA, 170 nt, unidentified
  source 1..170: mol_type = other RNA; note = Related to NZ_CADEUM010000003.1; note = Burkholderia cenocepacia
ggagtgcgcagattagtacgttgaggtgtatcgcctcgctgattgaagctggcgttagccccataatccctgacgggatttcatgtggcgctgactcgccacatgaaagcgtcggccctacgggccgcgttttcggagaaagtagcaggaagggtaatttgcgtgactcc

SEQ ID NO: 15850 - RNA, 163 nt, unidentified
  source 1..163: mol_type = other RNA; note = Related to NZ_FQXY01000011.1; note = Bacteroides sp.
tgagggcaaaatttagcacaaaagaggtgtagtcgcctcataagcacaggtattttcctagaaaataaattcttaggtataaataccttaaatttattttagtaaataactcatcctcttctctctttctttatatacatgatacaaaatggacggtatttta

SEQ ID NO: 15851 - RNA, 190 nt, unidentified
  source 1..190: mol_type = other RNA; note = Related to VWAM01000011.1; note = Bacteroides finegoldii
tgagggcagaatttagcatcaaagaggtgtagtcgcttcataagcacaggtattttcctagaaaataaattctaaggtataaatacctaaatttattttagtaaataactcatcctctcttctctcttttttatatgcatatacaaaatggacggaattttaataacgatcattgttatcaccgcttttc

SEQ ID NO: 15852 - RNA, 115 nt, unidentified
  source 1..115: mol_type = other RNA; note = Related to CP081916.1; note = Bacteroides faecis
ggatgaggaaaaatttagcagaaaagaggtgtagtcgcctcgcaggcacaggtattttcctggaaaataaatctctggtataaatacctctatttattttagtaaaatctcatcc

SEQ ID NO: 15853 - RNA, 117 nt, unidentified
  source 1..117: mol_type = other RNA; note = Related to FQZN01000002.1; note = Bacteroides stercorirosoris
ggatgagaaaaatatttagcaggaaagaggtgcagtcgcctcgtaagctcatgggctttcttagaatgtaaatactctggtatgaataccacgatttacattagtaaatactcatcc

SEQ ID NO: 15854 - RNA, 118 nt, unidentified
  source 1..118: mol_type = other RNA; note = Related to CP072251.1; note = Bacteroides cellulosilyticus
ggatgagaaaaagatttagcaggaaagaggtgcagtcgcctcgtaagctcaggagctttcttagaaatgtaaatactctggtataaataccacgatttacattagtaaatactcatcc

SEQ ID NO: 15855 - RNA, 113 nt, unidentified
  source 1..113: mol_type = other RNA; note = Related to SZUU01000003.1; note = Bacteroides fragilis
ggatgagataaagatttagcaaaaaagaggtgcagtcgcctcgtaaattcagggtttttctgattttctttattatgttgctcataagtaaagaaaagtaaataatctcatcc

SEQ ID NO: 15856 - RNA, 112 nt, unidentified
  source 1..112: mol_type = other RNA; note = Related to CP037440.1; note = Bacteroides fragilis
ggatgagataaagatttagcaaaaaagaggtgcagtcgcctcgtgaattcagggtctttctggatttctttattaagatactcataataaagaaaagtaaatactctcatcc

SEQ ID NO: 15857 - RNA, 111 nt, unidentified
  source 1..111: mol_type = other RNA; note = Related to CP036550.1; note = Bacteroides fragilis
ggatgagataaagatttagcaaaaaagaggtgcagtcgcctcatgaactcaggttctttctggtttctttattaagatactcataataaagaaaagtaaatactctcatcc

SEQ ID NO: 15858 - RNA, 112 nt, unidentified
  source 1..112: mol_type = other RNA; note = Related to RQYS01000018.1; note = Tannerella forsythia
aggtgagcagatattttagcatactgagaggtgtagtcgcctcattagttcaagtgttttcatagaaaagcatatttgtagacaaatatgctttaagtaaaagctctcacct

SEQ ID NO: 15859 - RNA, 148 nt, unidentified
  source 1..148: mol_type = other RNA; note = Related to JAEPKU010000005.1; note = Dysgonomonas sp.
ggatgagtaaaagatttagcaagaaagaggtgtagtcgcctcgttagttcatgtattttctgagatttaggaatgttctttattactacctaaatcttacagatttgcaggtgtactaaagaacattcctaaaagtaaacactcatcc

SEQ ID NO: 15860 - RNA, 148 nt, unidentified
  source 1..148: mol_type = other RNA; note = Related to NZ_GL891979.1; note = Dysgonomonas gadei
ggatgagtaaaagatttagcaaaaaagaggtgtagtcgcctcgttggttcatgccttttctgagattcagtaatactttgatttattacctgaacctttcagattcttaggtataaatcaaagtattactgaaagtaaacgcccatcc

SEQ ID NO: 15861 - RNA, 149 nt, unidentified
  source 1..149: mol_type = other RNA; note = Related to SELI01000017.1; note = Apibacter muscae
ggatgagttaaaatttagcaagaaagaggtgtagtcgcctcgttggttcatgcctttttctgagattcagtaataacttcgatttattacctgaacctttcagattcttaggtataaatccaagtattactgaaagtaaacgctcatcc

SEQ ID NO: 15862 - RNA, 150 nt, unidentified
  source 1..150: mol_type = other RNA; note = Related to NZ_OEPV01000016.1; note = Dysgonomonas sp.
ggatgagttgaaaatttagcaagaaagaggtgtagtcgcctcgttggttcatgcctttttctgagattctgtaataccttgattgtattacctgaatccttcagattcttaggtataaatcaaggtgttacagaaagtaaatactcatcc

SEQ ID NO: 15863 - RNA, 149 nt, unidentified
  source 1..149: mol_type = other RNA; note = Related to NZ_JACIEP010000005.1; note = Dysgonomonas hofstadii
ggatgagctaaagatttagcaagaaagaggtgtagtcgcctcgatagttcatgccttttctgagatttaggattgttctgtattactgcctaaatctttcagatttacaggcggtactacagaacaatcctaaaagtaaacacttgtcc

SEQ ID NO: 15864 - RNA, 149 nt, unidentified
  source 1..149: mol_type = other RNA; note = Related to JACMIC010000003.1; note = Dysgonomonas sp.
ggatgagataaagatttagcaagaaagaggtgtagtcgcctcattgattcatgcctattctgagattcagtaatactttgattttattacctgaacctttcagattcatggtataaaatcaaagtattactgaaagtaaatgctcatcc

SEQ ID NO: 15865 - RNA, 144 nt, unidentified
  source 1..144: mol_type = other RNA; note = Related to QVMQ01000008.1; note = Dysgonomonas sp.
gggtataaagatttagcaagaaaggggtgcattcgccccgcaaaatcatgtattttccgagatttagataaatgcctaaagctaatattctaaatcctccggaatttattcatgctttaggcatttatctaaaagtaaactccc

SEQ ID NO: 15866 - RNA, 149 nt, unidentified
  source 1..149: mol_type = other RNA; note = Related to QVMN01000003.1; note = Dysgonomonas sp.
ggatgagctaaagatttagcaaaagaagaggtgtattcgcctcatacactcatgttctttctggggatttaggcgtaattgtatgttatgtgctaaatcttacagattatagataacatacaattatgcctaatagtaaacactcatcc

SEQ ID NO: 15867 - RNA, 215 nt, unidentified
  source 1..215: mol_type = other RNA; note = Related to JAFPFX010000010.1; note = Prevotella sp.
gtgcaatgaacttcagcattgtagagatgaagtcgtctcccaaactaacagttgttttaccctttattatgcgcaaggcataataaagattacctctaggctttcgtgtctccttcgccactgaaaggcgaagtgtcgccttcccgcgtctcgtgtccccaaaagcctagaggtgattattgctctgtcttacgcttaagtgaagttcattgcac

SEQ ID NO: 15868 - RNA, 134 nt, unidentified
  source 1..134: mol_type = other RNA; note = Related to NZ_CP034930.1; note = Apibacter raozihei
tgagaatcaaaatttagcattagaggtgtattcgcctcgtttactgaggatatttagtagcaagtaaaaaagatacaaagtatctttatacttagttaagtattgataaacatatacttaagtaaatattctca

SEQ ID NO: 15869 - RNA, 190 nt, unidentified
  source 1..190: mol_type = other RNA; note = Related to PKRS01000005.1; note = Emticicia sp.
agatggggaaattagcatcacttggaggtgtaatcgcctcttgattaaatgcctacgttagccgttccctgtaactttagttacagggaagcagtttttcaaactgcttgtctaaatttatgctaaatttagacaacgaataaattgagttgtatcacattcaaaatacaaaaagtaattttcccattct

SEQ ID NO: 15870 - RNA, 170 nt, unidentified
  source 1..170: mol_type = other RNA; note = Related to QNTX01000003.1; note = Elizabethkingia miricola
agagtgaaagatttagcagattggaggtgaattcgcctcaggcatttaagttaattttaaaactacttaataaaactcattaagtaagttcttagcagaacttacctactaaattttactaacgtaaatttagtaaatagaataatacaatgaaagtaaatactcatcct

SEQ ID NO: 15871 - RNA, 168 nt, unidentified
  source 1..168: mol_type = other RNA; note = Related to MAUH01000030.1; note = Chryseobacterium sp.
aggtgaataaaattttagcagattggaggtgtagtcgcctcaggcttaaacggtagtttaatctacattagtaaactaataagttcttaacagaacttgttactaaatattactttggtaaatttagtaatgagaattacattacatagaaagtaaataaaaacacct

SEQ ID NO: 15872 - RNA, 169 nt, unidentified
  source 1..169: mol_type = other RNA; note = Related to JADEYP010000027.1; note = Sphingobacterium sp.
agggcagaaaaattagcaatacagagtttagatgtcgactcttttgattaggctgtaattagcctaacataaattatctgaaaagagaatttatgttggtaccttaacaggataccagttctattattagtaatagaactaagataaatatatagaaagtaattgccct

SEQ ID NO: 15873 - RNA, 177 nt, unidentified
  source 1..177: mol_type = other RNA; note = Related to QUMF01000012.1; note = Odoribacter sp.
ggatggagaatgaaactagcacgtcgaggtgcattcgcctctttgattaacgctattgttagccaaggtagtataacgggtactatcttagttcctaacggaactaagatactaaattctactaacgtagaagtttagtatcgagaataaatttcaatgaaagtagtttctccatcc

SEQ ID NO: 15874 - RNA, 178 nt, unidentified
  source 1..178: mol_type = other RNA; note = Related to NZ_ANLA01000010.1; note = Xanthomarina gelatinilytica
ggatggggaatgaaactagcacgttggaggtgtattcgcctcttagattaacgctggcgttaaccatactagtgccttaaaaggcactagtatagttcctaacggaactatactactaaatctacttcgtagtatttagcagttagaataaattacaatgaaagtagttttcccatcc

SEQ ID NO: 15875 - RNA, 177 nt, Pseudomonas fluorescens
  source 1..177: mol_type = other RNA; note = Related to LCYB01000004.1
tggggtcggctctagtaatcgaaggtgtatccgcctttatcattcaggctgattttagccacgaatgaattcaactctatcgctccactcgcttcgctcgctcctcgatagagttaaatccattcactacgtgaatgaatttaagtgaaaagagcaagctggtagggtcggccttca

SEQ ID NO: 15876 - RNA, 161 nt, Pseudomonas sp.
  source 1..161: mol_type = other RNA; note = Related to CP027736.1; note = Pseudomonas chlororaphis
tggggtcggctctagtaatcgaaggtgtatccgcctttatcattcaggctggttttagccactgaatgaattcaactctattgcttcgcaatagagttaaatccattcactgacgtgaatgaatttaagtgaaaagagcaagctggtagggccgaccttca

SEQ ID NO: 15877 - RNA, 161 nt, Pseudomonas sp.
  source 1..161: mol_type = other RNA; note = Related to NZ_QDGR01000012.1; note = Pseudomonas aeruginosa
tggggtcggctctagcaatcgaaggtgcatccgcctttatcattcaggctgcttttagccactgactgcgttgaactcaagcgcttcgcgctcaagttaaacgcattcactgacgtgaatgagtttatgtgaaaagagcaagttggtagggccggccttca

SEQ ID NO: 15878 - RNA, 156 nt, Pseudomonas sp.
  source 1..156: mol_type = other RNA; note = Related to NZ_CP067098.1
agggggtcggctctagcaatcgaaggtgttttcgccttcatcgttcaggctggttttagccactgaatgaaataaactctgctgcgcagagtgcatttcattcactgacgtgaatgaaatatcgtgataaaagcaagctcgtagagtcgatcccct

SEQ ID NO: 15879 - RNA, 162 nt, Pseudomonas sp.
  source 1..162: mol_type = other RNA; note = Related to NZ_CP077094.1; note = Pseudomonas promysalinigenes
tgggtccggctctagcaatataaggtgtagtcgcctttatcgttcaggctggttttagccactgaatgaattcaactctaccgctagcgcggcagagtctaatccattcactgacgtgaatgaattagagtgaaaacagcaagctagtagagtcgggcctca

SEQ ID NO: 15880 - RNA, 164 nt, Achromobacter sp.
  source 1..164: mol_type = other RNA; note = Related to CYTI01000008.1; note = Achromobacter xylosoxidans
cgtgtttgagcgttagcaatcgggggtgcattcgccctcattcggtaaggctgcttttagccactgaacagaaaaactcttcttcctacggaagaagagttctttccattcactgacgtgaatagaaagaagtgataaataatggttagtaacactcaaatgcg

SEQ ID NO: 15881 - RNA, 161 nt, unidentified
  source 1..161: mol_type = other RNA; note = Related to JAIZSD010000010.1; note = Burkholderia seminalis
cgggcttgagcgctagcaatcggaggtgcattcgcctctatcgataaggctgcttttagccactaaatgtataaaactctgcttcttcgaagcagagtttcatccattcactgacgttcctggatgaagtgaaaacgcatggtacgtagcgctcaggctcg

SEQ ID NO: 15882 - RNA, 165 nt, unidentified
  source 1..165: mol_type = other RNA; note = Related to NZ_WKJJ01000010.1; note = Massilia rivuli
cggcttgagcattagcaatctgaggtgttatcgcctctctcgttaaggctgcttttagccactgaatggatcatactctgcttcgacaagtcgaagcagagtacaattcattcactgacgtgaataaattgtgtgaaaaagtacggttcgtaatgctcaagctcg

SEQ ID NO: 15883 - RNA, 158 nt, unidentified
  source 1..158: mol_type = other RNA; note = Related to NZ_CAIGKG010000003.1; note = Cupriavidus necator
gggttttcagcgttagcaatcgaaggtgtcatcgccttcatcgtttaggctggttttagccactaaatgaatttactctgcttctgcgaagcagagtaaatccattcactgacgtgaatgtatttccgtgaaaactgcaggctcgtaacgctgaatcc

SEQ ID NO: 15884 - RNA, 169 nt, unidentified
  source 1..169: mol_type = other RNA; note = Related to NZ_RBXP01000016.1; note = Azonexus fungiphilus
tggagtctagtgttagcaatcgaaggtgttatcgcctttatcattcaggccgcttttagccactgaatgaatgctgactctgattctgcaagcagaatcagagtcacaattcattcactgacgtgaatgaattatcgtgaaaaatgacagttagtaacactagattcca

SEQ ID NO: 15885 - RNA, 179 nt, unidentified
  source 1..179: mol_type = other RNA; note = Related to CP014943.1; note = Colwellia sp.
tgaggttttgctctagcaatataaggtgtattcgcctttttcgattaggggttgtttaaccactaataggtctgatcacttaagaacgaataaaagacactattcgctcttaagtgatgagaattatcactacgtgacaatgtctcaaagtgaaaattttatagtagagcaggacctca

SEQ ID NO: 15886 - RNA, 188 nt, unidentified
  source 1..188: mol_type = other RNA; note = Related to NZ_FYAJ01000004.1; note = Photobacterium andalusiense
tgccttctagttctagcaatataaggtgtattcgcctttttcggttaggttaactttaacctaatcgaattataagagcctgcaccaagattcgaacggtggagctttgttcgaatcttggtgcacataacttccactacgtgtaaggttatgtattagaaaaagatagaaagtagaactagaaggca

SEQ ID NO: 15887 - RNA, 175 nt, Aeromonas hydrophila
  source 1..175: mol_type = other RNA; note = Related to NZ_CP028568.2
atgtgagaggggctagcattttgaggtgtcatcgcctctattgctcaggttaattttagccatcgagcaagtctaaactatgcacgcatcgaaaagactgatgcgcgcatagttcaaaattgatcactgacgtgatctattttggatgaaaatacagtaggtagcccctctccat

SEQ ID NO: 15888 - RNA, 172 nt, Aeromonas sp.
  source 1..172: mol_type = other RNA; note = Related to NZ_JRBG01000001.1; note = Aeromonas media
tagcgagaggggctagcaatatgaggtgttatcgcctctatcgttcaggctatttttagccactgaacaaaccactgcacgcacatcgaaaagatgatgcgcgtgcagtgaagtttgttaactgtcgttaacaaacttcgagtgaaatatcagttagtagcccctctcactt

SEQ ID NO: 15889 - RNA, 176 nt, unidentified
  source 1..176: mol_type = other RNA; note = Related to JAIUIU010000040.1; note = Mesorhizobium sp.
tggccgccccggttaggacgatgaggtgttacgcctcgggactaaaggtgtctttatcatctctgcgagggctaacgcccatcgctaatgagccctaacaggctcattgccatgtcgctaacgcgcatggatgaaatacaaatatgtataatgatgaatagtaatcgaggcggtca

SEQ ID NO: 15890 - RNA, 173 nt, unidentified
  source 1..173: mol_type = other RNA; note = Related to SJST01000002.1; note = Oricola cellulosilytica
atgcctcgctcgatagcacttaggggtgcactcgcccctcagtctcacgggggatttagcactttggacctgctacaatcaggtcccacagggctacgcccttgtgtcgggaaaccgcaaagcggttgtcccaaaaagaagatgaactttcttgattgtatcgggcggggcag

SEQ ID NO: 15891 - RNA, 174 nt, unidentified
  source 1..174: mol_type = other RNA; note = Related to JAEPPB010000039.1; note = Pseudomonadales bacterium
agggggctcccaatagtattaggagatgttttcgtctccatttcgataaggctagctttagcggacacactggcgtgtaaacacgccagtaacctggaaaacggttagtattttgtgtcattaacatgacttttattactgtgtcataaaagaagaaagtattgggagtcccct

SEQ ID NO: 15892 - RNA, 171 nt, unidentified
  source 1..171: mol_type = other RNA; note = Related to NZ_CAKLOR010000001.1; note = Klebsiella variicola
tggctgcatacgctagattatgaaggtgaattcgccttttatgcttaggctacctttaacctgttaatggttaaaggccactacaacgttcttcgaacgttgtagtgaacattaatcattaacatgattaatgttgagcagaaacaaaaccgttagtagcgtatgcagtct

SEQ ID NO: 15893 - RNA, 107 nt, unidentified
  source 1..107: mol_type = other RNA; note = Related to SLYT01000019.1; note = Rahnella sp.
tgctgtccagctctagtttaataggtgtatcgcctatggatgctaaggttttctttaacctcacgagttctgcattttttcttttgattcggtagtgctggacagca

SEQ ID NO: 15894 - RNA, 104 nt, unidentified
  source 1..104: mol_type = other RNA; note = Related to NC_010334.1; note = Shewanella halifaxensis
ggctatccagcgttagttagtataggtgaatcgcctatcttgttgaggtcctttttaacctcatcaattctattacaagctccggttcgtggcgttgggtagcc

SEQ ID NO: 15895 - RNA, 101 nt, Vibrio sp.
  source 1..101: mol_type = other RNA; note = Related to NZ_MCYY01000073.1; note = Vibrio breoganii
ggctatccagcgttagctagtataggtgaatcgcctatcatgtgaggttctttttaacctcataaattctattggccggcatattgttgcgctgggtagcc

SEQ ID NO: 15896 - RNA, 109 nt, Aeromonas sp.
  source 1..109: mol_type = other RNA; note = Related to JH823256.1; note = Aeromonas veronii
ggctgctcactgctagtgagtataggtgtatcgcctatcattatgttgaggtttattttaacctcattacattctaaaaagacgttgttgttcgtggcggtgagtagcc

SEQ ID NO: 15897 - RNA, 160 nt, Vibrio sp.
  source 1..160: mol_type = other RNA; note = Related to NZ_LNRB01000009.1
tggagctaagctcccatgggtgattcgcctatgtcgttaagggtttttttaacctcactacgttctattaaatatttaaaagactttcgtgatactgagtagctacctacttcttggagcaagatttgagtccagaatacaaaaagtggtttgagttcct

SEQ ID NO: 15898 - RNA, 174 nt, unidentified
  source 1..174: mol_type = other RNA; note = Related to JAAFZY010000006.1; note = Mangrovimonas sp.
ggagggaaaggattagaagatggagtgtagtcgctccagtaaagcttaggctgttttaaccattgtgatgatttgttagaactgaaacatgcaagggcagtttcagcgataataattcatctcaaatcgaatggaaaagatttatttcgaattattatgtaatcctttctctct

SEQ ID NO: 15899 - RNA, 183 nt, unidentified
  source 1..183: mol_type = other RNA; note = Related to FNSF01000001.1; note = Tenacibaculum sp.
tgagagagaggattagaaaataaggcgtagtcgccttagtaaggctcaggctgttttatccattgaaatgatttgttagcactgaaaatatttcgatatatttccagagataataaaacatctcaacatttgataaagtttcgagttttattgctttaaggattgtcgtaatcctctcttttt

SEQ ID NO: 15900 - RNA, 174 nt, unidentified
  source 1..174: mol_type = other RNA; note = Related to JAIQZE010000004.1; note = Psychroflexus sp.
agagaagaggaattagaaaatgaggcgatgtcgcctcagtacagttaaggctgttttatccattataatgatttgttagaactgaaatcagaaaattgattccagttacaataattcattatttgtaaagaatggatttctattttatgaattattgtgtaattcttcttctct

SEQ ID NO: 15901 - RNA, 178 nt, unidentified
  source 1..178: mol_type = other RNA; note = Related to BBMM01000006.1; note = Nonlabens ulvanivorans
gaaaagggagaattagaagatggagtgtaggcactccagtgcggcttaggctgttttatccatttgatgcattgctacaactgaaatcaagaaaaatgattccagttataaaaattcttcaatagtaatattgaagtatttagttttatatcgaatttttacgtaattctcccatttt

SEQ ID NO: 15902 - RNA, 178 nt, unidentified
  source 1..178: mol_type = other RNA; note = Related to JAHXPQ010000003.1; note = Mucilaginibacter sp.
aagagaatagtactagcgtttataagtcgtagcgacttttttaataaggctgatttaaacctcagtttttgtaccaaaaacaaatattctaacgaatattatttgaatgattcattccattgtatttcattcacattcaattagaattaatttcaatgatgtgtagtactattccttt

SEQ ID NO: 15903 - RNA, 168 nt, unidentified
  source 1..168: mol_type = other RNA; note = Related to JAGQWR010000133.1; note = Saprospiraceae bacterium
agaggagtaggtactagcaactttgaggcgatgtacgcctttatgattgacgctggcgttagccacggggtagcattttaactaatgctaccaattcttcgaattgaaaatcaccggagttgattttatcagaatctatgattaatagaatagtagtacctctcctct

SEQ ID NO: 15904 - RNA, 193 nt, unidentified
  source 1..193: mol_type = other RNA; note = Related to JAGNNE010000423.1; note = Leptospiraceae bacterium
agcttgtagctagttgtatgagatgttatcgtctcagggatttaggccgagtttagcccattttgtggttgcataaaagaactgatttttatgcaaccacaaatgctcctcggtagctgcatttgcatagttgctgcattaacatgcaataatatgcaaatgaagttcctttcagagaaggtagctacaagct

SEQ ID NO: 15905 - RNA, 236 nt, unidentified
  source 1..236: mol_type = other RNA; note = Related to CP027860.1; note = Ahniella affigens
cgaagtcggaaagctagacgttggagtgtcatcgctccctatgctgaggcgagcaatcgtctcagtcgacgtaccgggaaatcatcagtacgtcgactgcaaccagtttgtcaaaccttcggtttgccaacctggctgcaacaaagaagttcgctgtcaagcgtcccgcttgccatcgaacttctttgctgtgcgtgctttgcagcacgtaatagtattaagtagcaccggcttcg

SEQ ID NO: 15906 - RNA, 225 nt, unidentified
  source 1..225: mol_type = other RNA; note = Related to JAFIXE010000059.1; note = Stenotrophomonas maltophilia
ggcctggtcgcgcattagaagatggagtgtagtcgctctgtgtattgaggccattttcggcctcgctactgacgattttaacaaatcgtcagtatcaggcgccccttcgggtcgcctcagcgcgtagtcagcctgaccgtgcgcattcgcacgctcaggctgcctacacgccgagcgatagtacaaatgtactatcgtaaaagtgaagtaatgtgccggccggcc

SEQ ID NO: 15907 - RNA, 229 nt, unidentified
  source 1..229: mol_type = other RNA; note = Related to NZ_FNNB01000012.1; note = Sulfitobacter pontiacus
gagtggtcaccgctagcgtttagaagtgtagtcgcttctacggttaaggtgggcgaaagccttacagtaacatttcttgagtttctcaagaaagtgttactgtgcctccttgcgtcggcaggcccgaaatacgatgaaatttcaattttcaatgctgaaaatggaaattcatcgaatttcaggcgtaagcgatgcgagcatcgaagagatctggtagcggtggccacgc

SEQ ID NO: 15908 - RNA, 237 nt, unidentified
  source 1..237: mol_type = other RNA; note = Related to NZ_CP044970.1; note = Brucella anthropi
gagtggtcgcagttagcgcacggaagtgtaatcgcttctgcggttaaggctcacgatagccttgtggacactcgattttttgagtctctcaaaaaagtcgagcgtccaatgtctcctcatccgagggacagacacgtgaaccacagaaaccttcgtttttattcaaaaacaaaggttctgcgcttcacgtgtctaagcgatgtaaacatcggaatgatctggtagcggcgaccactc

SEQ ID NO: 15909 - RNA, 236 nt, unidentified
  source 1..236: mol_type = other RNA; note = Related to JACIDV010000004.1; note = Rhizobium skierniewicense
gaatggttgtcattagcgcaaagaagtggattcgcttctgcggttgaggttcgcgatagcctatcgactactcgatttttagagtgttctaaaaagtcgagtagtcgaaatgcgctctccgagcgcatcggcacgattgtcgcagaaactcgaattttcttagaaaatccgagttctgcgtcactcctgccgcagcgatgccttgcatcgaaatgattacgtaatggcaaccattc

SEQ ID NO: 15910 - RNA, 230 nt, unidentified
  source 1..230: mol_type = other RNA; note = Related to NZ_BACT01000550.1; note = Methylobacterium sp.
aggcggccgacgttagcgtttaggagtgtagtcgctcctacgggtaaggctggcgtaagccatcgccggggttcgatttggcgtcccgccaaagtcgccccccggtgtgtcaccctatcgggtgaccagcaatacagccaaaaaggccctgtgagactactcacagcgccttttgtctgcattgctgatgcgttgctcgcaacggattgatcaagtaacgtcggccgcct

SEQ ID NO: 15911 - RNA, 227 nt, unidentified
  source 1..227: mol_type = other RNA; note = Related to NZ_SKCI01000005.1; note = Marimonas lutisalis
ggctggcgctcggctagtgtttcgaagcgaagtcgcttcggcagctaaggctgagtttaacctccagcagggagattcgaactcgttccgacttcgcatctccctgcgggcagcgggttcatcttctttgaatctgaatccgcgccataacgacatcttgcagtcgcaagatgtcgttatggagcgtcttccagacggaagtgggaagtagtagtcgtgcgccggcc

SEQ ID NO: 15912 - RNA, 152 nt, unidentified
  source 1..152: mol_type = other RNA; note = Related to NZ_GL883080.1; note = Asticcacaulis biprosthecum
gggtggcgatagcactttgaggcgatctcgcctcgttggctaaggccaagtttatgcacaggtcaggacacgtcctgacctacgccccggtggggcgtagtatgccataaaggcatgttgtgaacgatgttgatgagaaggtatcgccaccc

SEQ ID NO: 15913 - RNA, 163 nt, unidentified
  source 1..163: mol_type = other RNA; note = Related to JAAXEP010000005.1; note = Rhizobium leguminosarum
aggcgggtggtgatagcacggtgaggcgacttcgcctcgttggctaaggccaggtttatgcactgggcaagactgcgctttgccctacgtccctgcggggacgaaacgatgccataaaggcatcgagtgaactacgttaatttgaaggtatcaccacccatca

SEQ ID NO: 15914 - RNA, 155 nt, unidentified
  source 1..155: mol_type = other RNA; note = Related to NZ_CAKLBS010000005.1; note = Sphingomonas sp.
gggtggcgatagcacgttgaggcgacctcgcctcgttggctaaggccagatttatgcacagggccttcttgcagaaggccctcgcaccctgcgggatgcgtgcgatgccataaaggcatcgagtgaactttgttgatttgaaggtatcgccaccc

SEQ ID NO: 15915 - RNA, 184 nt, unidentified
  source 1..184: mol_type = other RNA; note = Related to NZ_CP022528.1; note = Qipengyuania flava
gttagggcggcgatagtgtccagaggcggtttcgcctcgtttagttaggcttcgtttatgcatacattctccgcgcgaggcttacccgtcgcggagatcgtatccacacttcgtgaggatacgaagtcatacgcgagctagacttcatatgaacgtgttgatgcgaaggtatcgccgccctaat

SEQ ID NO: 15916 - RNA, 204 nt, unidentified
  source 1..204: mol_type = other RNA; note = Related to JAJTGN010000370.1; note = Roseomonas sp.
gggtcagctcgatagcataaagaggcgtagtcgcctctgtggtttaggctgacgttagacttgcgtaatgcacattcgtgcattacttatgcatctcaatcgatgcatatgcatctcaatcgatgcataaaatgcaaaattttgcaaaccgcaaaatttgcattgagggatggcttcgtagaaggtaaagtatcgttctgatcc

SEQ ID NO: 15917 - RNA, 165 nt, unidentified
  source 1..165: mol_type = other RNA; note = Related to NZ_JROG01000004.1; note = Sphingomonas sp.
gcgatggtgcggttagacttagaggtgggttcgcctcggttgctaagggttccgttagatgctcggcgatcattcgatcaccgatgagcacctacggcgctcatagaactacataatatagtagttctagcaaattatcatgacggatagtatccgcaccatcgc

SEQ ID NO: 15918 - RNA, 165 nt, unidentified
  source 1..165: mol_type = other RNA; note = Related to NZ_BEWP01000006.1; note = Gluconobacter kondonii
gcgatggtgtggttagacaaagaggcgggttcgcctcggttgcaaagggcttcgttaggcgctcggtaatcgttcgattaccgaaacgcgctttcagcgctcttagaactacatataatagtagttctagcaaatctctatgatcgatagtatccgcaccatcgc

SEQ ID NO: 15919 - RNA, 173 nt, unidentified
  source 1..173: mol_type = other RNA; note = Related to JAHVKP010000001.1; note = Qipengyuania aquimaris
agcggctcatcggttagacatagaggcggcttcgcctcggttattaacggttccgttagatactaggctttccttcgcaaagcctatgagcactttcagtgctcatgaaattacatatataaatatagtaaatttcagttaattatatgactgatagtatccgatcagccgct

SEQ ID NO: 15920 - RNA, 176 nt, unidentified
  source 1..176: mol_type = other RNA; note = Related to NZ_PHSN01000004.1; note = Acidimangrovimonas sediminis
gggcgggcatggatagaacttagaggcgcattcgcctcggttgttcaggctgactttaaggcagcctccctcaagagggaggctgttgttcctgcggaacaacacggtgcccatgaagggcaccatgcagatatcatattttagatatgatataaattattaggtatcctccgtcc

SEQ ID NO: 15921 - RNA, 172 nt, unidentified
  source 1..172: mol_type = other RNA; note = Related to SJNG01000007.1; note = Rhizobium leguminosarum
cggggcgcagcgatagttcttgggggtagattcgcccctgcaagcttaggagcgcgttaaattttcttcacgcacttcgcgcaagaagcatagatcctttggatctatgtttactgcataaagcagtaacgaagaatatatactatattcactctggtatcgttgcgctcca

SEQ ID NO: 15922 - RNA, 128 nt, unidentified
  source 1..128: mol_type = other RNA; note = Related to LMCG01000027.1; note = Pseudovibrio sp.
agcaggatctgcgatagtatgtggcgcagtcgccacatcaactcaggggcccgttaacgttcctataaattaattttataggaatttggtttttgatatgattatttatggtatcgcagtttcctgct

SEQ ID NO: 15923 - RNA, 178 nt, unidentified
  source 1..178: mol_type = other RNA; note = Related to VFTI01000007.1; note = Mesorhizobium sp.
ggcatcaaggaactagcgcaacgaggtgaattcgcctcggcgacttaggctagagttaagcccattcggtaatcgaagaagattaccgagaggttctacgaacctcagacaactaacattgttatttgtcgatgaagcagtcgaaatataaatctgtattatgtggtgacttggtgcc

SEQ ID NO: 15924 - RNA, 177 nt, unidentified
  source 1..177: mol_type = other RNA; note = Related to NZ_AYXE01000006.1; note = Mesorhizobium sp.
ggcatcgggaagccagcgcaacgaggtgcaatcgcctcggcgacttaggctaaggttaggcccattcggcaatcgaagagattaccgagaggttctacgaacctcagacaagtaacatggttatttgtcgatgaattagttgattggtacaatcatattatgtggtaacccggtgcc

SEQ ID NO: 15925 - RNA, 172 nt, unidentified
  source 1..172: mol_type = other RNA; note = Related to LR701476.1; note = Roseovarius sp.
tgaaggctcggcgatagtaacgggaggtgtatccgcctccgtcttgttaaggtgtgcgttagattatcttcacgcgccttgcgcaagaagcatgggatctaaagatcccatgttactgcataaagcagtaatgatatcatgaagtatgatttctttgtatcgctgaccttct

SEQ ID NO: 15926 - RNA, 214 nt, unidentified
  source 1..214: mol_type = other RNA; note = Related to DXFG01000149.1; note = Candidatus Blautia pullistercoris
agaccggggacagcatatgcagaaaattttcttgcaggaaatgttctgcggcagaagcgagtcgcttttgctttgatcttttccgggtatgatggcacagccagcccttcatcagctcttgtgtacatccgcacacttcatgtgcataaataagccttcggcttattggtacacagccgctgcttacggtatcaccattttgtgttcccggtcc

SEQ ID NO: 15927 - RNA, 218 nt, unidentified
  source 1..218: mol_type = other RNA; note = Related to DWUX01000243.1; note = Candidatus Blautia stercoripullorum
agactggggacagcatacgcagaaaatattctcccttacaagatgatttctgcggcagaagcgagtcgcttttgctttaatcttttccgggtattatggcacagccagcccttcatcagctcttgtgtacatccgcacacttcatgtgcataaataagccttcggcttattggtacacagccgctgcttacagtatcaccatttcgtgtccccggtcc

SEQ ID NO: 15928 - RNA, 193 nt, unidentified
  source 1..193: mol_type = other RNA; note = Related to DXBG01000050.1; note = Candidatus Blautia pullicola
tttcgggaaacagcttacgcagattttctgcccccaaggcgagtcgcctccgggtatttattccagggttttctggctctgccagcccttcatcagctcttgtgtacaaccgcacatttcatgtgcctgccaagccttcggcttgtggtacacagccgctgcttacggtatcaccattttgtgtttcccgaac

SEQ ID NO: 15929 - RNA, 189 nt, unidentified
  source 1..189: mol_type = other RNA; note = Related to JAGZGI010000008.1; note = Lachnospiraceae bacterium
tcacagcagacagaggagacagttttctgtcagagaagcgagtcgcttttctattttttattccgaaaggtatggctgcgccagccctccttcggctccgaggtacatctgcacactgcatgtgctttctcgcctgcggcgccgtacctcttcgccgaatccggtatcaccatttagtgtctgctgtgt

SEQ ID NO: 15930 - RNA, 189 nt, unidentified
  source 1..189: mol_type = other RNA; note = Related to NZ_CP030280.1; note = Blautia argi
acacagcagacagcgaggacagatttctgtcagagaagcgagtcgcttttctattttttcaataaaaggaatggctttgccagcccttctttggcttcgaggtacatctgcacatttcatgtgctttgcccgcctgcggcgcagtacctcttcgccaaatccggtatcaccattttgtgtctgctgtgt

SEQ ID NO: 15931 - RNA, 192 nt, unidentified
  source 1..192: mol_type = other RNA; note = Related to CP022413.2; note = Blautia hansenii
acgcagcagacagcgaagacaacgaaaaacttcatgtcagaaaagcgagtcgcttttctatgttataaattaagcgatggcttatgccagctctgcattggctacgccgtacatcggcacatttcatgtgcttttgcctgcggcttgtacggcttcgccaatttctttatcaccattttgtgtctgctgtgt

SEQ ID NO: 15932 - RNA, 198 nt, unidentified
  source 1..198: mol_type = other RNA; note = Related to DVGS01000147.1; note = Candidatus Egerieimonas faecigallinarum
cgcagaaggacagcgttcacaggttgtttctgtgggggaagcgagtcgctttcctgaatttcttttccggcgggacggcttcgcccgccctgcgtcagctccgatgtaccgcgggcatggagatgcccgcgtccagccttccagctggttctgcacatctgcgctgtctccggtatcatctctttgtgtccttctgcg

SEQ ID NO: 15933 - RNA, 194 nt, unidentified
  source 1..194: mol_type = other RNA; note = Related to DXGZ01000117.1; note = Candidatus Mediterraneibacter vanvlietii
agaccggggacagcgcatgtgaaatctgtttcaccggggaagcgagtcgctttcctgattctctgatctgcaggtacggcgtggccgtcccttacaccgctcctgtgtacttctgcacactgcgtgtgctttcgtgcctgcggcacgcgtacacatccgcgggatgcggtatcatcattttgtgtccccggttt

SEQ ID NO: 15934 - RNA, 195 nt, unidentified
  source 1..195: mol_type = other RNA; note = Related to DXEY01000047.1; note = Candidatus Mediterraneibacter colneyensis
ataccggggacagcggtatgcggaacggttccgcacagggaagcgagtcgctttcctgctattttctgttgcgttatgatggcacagccatccctccatctgctccgatgtactaccgcacacggcgtgtgcatgtgccttcggcacgggtacacctccgcagattacggtatcaccatatagtgtccccggtaa

SEQ ID NO: 15935 - RNA, 199 nt, unidentified
  source 1..199: mol_type = other RNA; note = Related to NFKT01000023.1; note = Proposed Lachnoclostridium sp.
ataccgggaacagcttactgcagaaaccagacttttccgcagggggaggcgagtcgccttcctgttatttttatccggtgaaacggcactgccgtccctccgccgctcctgtgtactactgcacacttccatgtgcatgcgcctgcggcgccggtacacatccgcggattacggtatcaccatattgtgttcccggttt

SEQ ID NO: 15936 - RNA, 219 nt, unidentified
  source 1..219: mol_type = other RNA; note = Related to JAJEQX010000005.1; note = Ruminococcus sp.
agaccggggacagcgaagcgcggatactgagcgacgccagtacagaacgcgcaggggaagcgagtcgctttcccttctgacatttacccgggtgatcatggctctgccatccctgcacccgcttctgtgtactgctgcacactttcatgtgcctggccgtgcctgcggcactggtacacatacgcgggttccggtatcaccatatcgtgtccccggttc

SEQ ID NO: 15937 - RNA, 210 nt, unidentified
  source 1..210: mol_type = other RNA; note = Related to JAGTTS010000004.1; note = Clostridiaceae bacterium Marseille-Q3526
cggcagacggcagcgaaaaagcgtttcatacaggctttttggaagagcgagtcgctcttcctgtggataaaaagaggacaggcagcttcgcagccttccgaatctccttcgccgtacatggtttccggtttccggaaactcctatcctcttcgaggatatggggtacggctttggaagaaccggcattgccgttttagtgctgtctgccg

SEQ ID NO: 15938 - RNA, 210 nt, unidentified
  source 1..210: mol_type = other RNA; note = Related to NZ_CP085988.1; note = Clostridium sp.
aggcgcgcggcagcgaatggaacataagggttcccaaaggagcgagtcgctctttttgtcagaagggaggggcaggcagcgctgtctgccttccaaatcatctgcaccgtacagggagcgcccatgcggtgcatgaacgccggtatcccctgcggggatattcagtacggctccgaagattcggcattgctgtgacagtgccgcccgcct

SEQ ID NO: 15939 - RNA, 252 nt, unidentified
  source 1..252: mol_type = other RNA; note = Related to JAGZWN010000002.1; note = Clostridiales bacterium
ccccggacagcggaaagcgggaaatggacggaacgccctcttcgggggcggctcctgaaaaaactgcgggaaatgcgagtcgcatttctgagaaagaagaaagcaccggcagacacggtctgcatgacaatggaacttccttccattgtcataaaaaacggctgcagcgtacgactgcacaccttgcggtgtgccaggccgccgtcggctggcacgcctccgccgttttgtatcacagtattgtgtccggga

SEQ ID NO: 15940 - RNA, 185 nt, unidentified
  source 1..185: mol_type = other RNA; note = Related to HF995414.1; note = Firmicutes bacterium CAG:646
tgaaacaggatagcgtaagcagagagatctgcggggaaaacgagtcgttttcctgaaagagtaggagagataaccggctttgccggccggaattacgccaaggtacgactgcacactagggtgtgcttacagccttcggctttgtacctttctgtaattccctatcacgatttagtatcctgtca

SEQ ID NO: 15941 - RNA, 195 nt, unidentified
  source 1..195: mol_type = other RNA; note = Related to DXHY01000007.1; note = Candidatus Eisenbergiella stercoravium
aaccggaaagcagcgttgctgctggcagaaccggcccggcagcgagtcgccgtcgggagagaatatcaggaggcggcaggcatgcctgcaccgcagcctgcttcgaggtacatctcacaacccgcttcgcggattgtgtctccgccttcggctgtacccctgcgcattctgcagaatcagagtattgtgtcggac

SEQ ID NO: 15942 - RNA, 215 nt, unidentified
  source 1..215: mol_type = other RNA; note = Related to DWUW01000200.1; note = Candidatus Eisenbergiella stercorigallinarum
gcccgttcgacagagaaaccggaaagcagcattgctgctggcagaaccggcccggcggcgagtcgccgtcgggacagaatatcaggaggcggcaggcatgcctgcaccgcagcctgcttcgaggtacatttcacaacccgcttcgcggattgtgttgccgccgtcggctgtacccctgcgcattctgcggaatcagagtattgtgtcggccgggc

SEQ ID NO: 15943 - RNA, 219 nt, unidentified
  source 1..219: mol_type = other RNA; note = Related to DXDD01000050.1; note = Candidatus Eisenbergiella pullistercoris
cccctgccggcagggaaaccggaggcagccgtcagggctgcgcacagcttcggaccggcggcgagtcgccgccgggagacaggatcgggagaaggcaggatggcctgcaccgcagcctgctccagggtacaacgcacaattccgcttcgcggattgtgtcgccgctttcggctgtacccctgcgcattctgcggaatcagcgtattgtgccggaagggg

SEQ ID NO: 15944 - RNA, 196 nt, unidentified
  source 1..196: mol_type = other RNA; note = Related to DWWS01000044.1; note = Candidatus Eisenbergiella merdavium
ccggaagcgtcagcgtgtctgaatgcaaagaccggcccggcggcgagtcgccgccgggaaagatcatcaggaggcggcaggcatgcctgcaccgcagcctgcttcaaggtacgtcgcacaatccgcagagcggattgtgtcagccgccttcggctgtacccttacgcattctgcggaatcggagtatcgtgtcggg

SEQ ID NO: 15945 - RNA, 216 nt, unidentified
  source 1..216: mol_type = other RNA; note = Related to DWWH01000066.1; note = Candidatus Eisenbergiella intestinipullorum
gcccgcccggcagaaaaaccggaaacagacggctcggaaagcgtctttcggaccggcggcgagtcgccgccgggacagatcaatatcaggcggcaggcgcgcctgcaccacagcctgcttcagggtacatctcacaacccgcttcgcggattgtgcagccgccttcggctgtacccctgcgcattctgcggaatcagaacaaggtgccggacgggt

SEQ ID NO: 15946 - RNA, 198 nt, unidentified
  source 1..198: mol_type = other RNA; note = Related to AP025576.1; note = Lachnospiraceae bacterium
acccggctgacagcatatccggaaactggagttttccggcctgacggggagtccccgccgggaaaaacagacagccaggacgcaggtgccctgcgaccgcaagctgttccaaagtacatcagcacactcccgtgtgcacaccgcctgcggctgtacatttccacagcttacggaatcggtgtattgtgtcagccggtg

SEQ ID NO: 15947 - RNA, 198 nt, unidentified
  source 1..198: mol_type = other RNA; note = Related to NZ_MCGI01000005.1; note = Eisenbergiella tayi
atccggctgacagcatattcggaaaattaattttccggcctgacggggagtccccgccgggaagaacaggctgcgcggacgcaggtttcctgcgaccgcaagctgctccaaggtacatcagcacactttacgtgtgcacaccgccttcggctgtacatttccgcagcttacggaatcggtgtattgtgtcggccggat

SEQ ID NO: 15948 - RNA, 209 nt, unidentified
  source 1..209: mol_type = other RNA; note = Related to NZ_QVLV01000005.1; note = Eisenbergiella sp.
agccggccggcagcatatccgggagaatattttccggcctgacggggagtccccgccgggagttagaaacagtgggcatgcagaatactgcatgcagaatcctgcacccgtaatccgctccaaagtacatccgcacacttccgtgtgcacaccgccttcggctgtacatttccgcagcttacggtatcggtgtattgtgccgtccggct

SEQ ID NO: 15949 - RNA, 215 nt, unidentified
  source 1..215: mol_type = other RNA; note = Related to RAYB01000053.1; note = bacterium 1XD21-70
aagacggcagcagatgaatcagcacttttttgcatggagacaggccaggaagggctggacgggcgccgagtcggcacccggtacagaaaatgccaggaaagcccacagcctgccctaaggtacagccgcacctttcaggtgcatcccgccgtttgcaccggcgtttggtacctatgcgcagtctgcggaatccctatataaagtgctgccgtttt

SEQ ID NO: 15950 - RNA, 216 nt, unidentified
  source 1..216: mol_type = other RNA; note = Related to RAYY01000002.1; note = bacterium D16-56
aaagcagccgcagacaagccagggtatttgatggatgagattcagacatcaacagactttgggcggacggcgagtcgccgcccggaaaaaacagtgacaggaaagtccgcagccagctccaaggtacatccgcacattacatgtgcttcgcgccggcttcaccggcgtatggtacctttgcgcagcctgcggtatccgaatgagtgcggctgcttt

SEQ ID NO: 15951 - RNA, 196 nt, unidentified
  source 1..196: mol_type = other RNA; note = Related to CP069520.1; note = Enterocloster bolteae
ggaaaagcaacagcattttcaggaatattgcataggcagtaagcctggacggacagcgagtcgctgcccggagtgaatagcagagggataagtccgcaagctgcgccgtggtacatccgcacatttcatgtgcccgccgctttgcggcccggtacccctatgcatcttacggtatccggatacgtgttgcttctcc

SEQ ID NO: 15952 - RNA, 195 nt, unidentified
  source 1..195: mol_type = other RNA; note = Related to JAKNTH010000001.1; note = Enterocloster sp.
ggaaaagcaacagcattttcaggaatattgcatgggcagtgagcctggacggacagcgagtcgctgcccggagtgaacagcagagggatgagtccgcaatctgcgccggggtacatccgcacatttcatgtgccggccgccagcggcccggtacccctatgcatcttacggtatccggatacgtgttgcttctcc

SEQ ID NO: 15953 - RNA, 183 nt, unidentified
  source 1..183: mol_type = other RNA; note = Related to DWYS01000122.1; note = Candidatus Enterocloster faecavium
cgggcgttggcagcgaaatcagagcaatgctttgggcgggcggcgagtcgccgtccggagtgggagaactcagggatcagcccccaggcagctacgatgtacggccgcacatttcatgtgcataaagcctgcggctttgtacatctgcgcttcctggtctatccctgtcagtgctgacgccca

SEQ ID NO: 15954 - RNA, 183 nt, unidentified
  source 1..183: mol_type = other RNA; note = Related to DWWB01000077.1; note = Candidatus Enterocloster excrementigallinarum
tctgcggcagcagcgaaatcaaagcggtgctttgggcgggcggcgattcgccgtctggagtaggaaattgaggggatcagcccgcaggcagctgcgatgtacggcagcacatttcatgtgcataaagcctgcggctttgtacatctgcgcagcctgcgctatccttgtttgtgctgccgccca

SEQ ID NO: 15955 - RNA, 205 nt, unidentified
  source 1..205: mol_type = other RNA; note = Related to JAJCIC010000013.1; note = Lacrimispora sp.
ctttatgcagcagcgaagccggttaagccaggagaaattgtaccggaatgaccggacggacggcgagtcgccgcccggaagaaaatagtaatgggacagaccgtaatcagctccgaggtacatcagcacatttcatgtgctatgctgctgacgcagcttgtacatctgcgcagcttacggtatcgggaatcagtgctgcgggctg

SEQ ID NO: 15956 - RNA, 180 nt, unidentified
  source 1..180: mol_type = other RNA; note = Related to DWWT01000008.1; note = Candidatus Enterocloster excrementipullorum
caaaagcagcagcccagccggaagaatcctttcggacgggcggcgagccgccgcctggaatttttttgttgtgacacagtccgcaagctgctccgatgtacttctgcacactgcatgtgcccggcctgcggcccggtacacctttgcagcttacggtatccgtaaacgtgctggattttg

SEQ ID NO: 15957 - RNA, 183 nt, unidentified
  source 1..183: mol_type = other RNA; note = Related to NZ_PGET01000001.1; note = Clostridium celerecrescens
gcagaagcaatagtatttccgcatgtaatgatcctgcggccgggcagcgagtcgctgccgggaatttcatggtttaggcaaaggccataatctgctgcgaggtactaccgcacattgcatgtgcctgcgcctgcggcttgtacatcttcgcatcttacggcatcatgtttgtattgcttctgt

SEQ ID NO: 15958 - RNA, 276 nt, unidentified
  source 1..276: mol_type = other RNA; note = Related to NZ_AZUI01000001.1; note = Clostridium indolis
gcagaagcaatagtatttccgcgagaaatgggccaaaggaatatgatgtatatacgtttggcccatgccgcggcagctgagaaaaacctgcatagcgtgtttttctcagctgccggcagaataaatctccggccgggcagcgagtcgctgccgggattttcatggtatggaaaaaggccgtaatctgctgcgaagtacttccgcacattgcatgtgcttccgcctgcggcttgtacgtcttcgcatcttacggcatcaaatttgtattgcttctgt

SEQ ID NO: 15959 - RNA, 191 nt, unidentified
  source 1..191: mol_type = other RNA; note = Related to NZ_JHWJ01000001.1; note = Clostridium aerotolerans
gcagaagcaatagtttttccggattaagtattcggccgggcagcgagtcgctgtccggatcatcataggatcataatagaccgcaagctgctgcgaagtaccaccgcacattgcatgtgcatgcgcatgtgcgggacacatgcgtgcgtacgtcttcgcatcttacggtatcattttagtattgcttctgc

SEQ ID NO: 15960 - RNA, 188 nt, unidentified
  source 1..188: mol_type = other RNA; note = Related to NZ_MCIA01000032.1; note = Lacrimispora algidixylanolytica
gcagaagttatagtttttccggtaaaactgccggctgggcagcgagtcgttgttcggattatcatagggttacaatagaccgcaatctgctgcgaagtacttccgcacattgcatgtgcatacgcatgtgcaagacatgcgcgcgtacatcttcgcatcttacggtatcattttagtattgcttctgc

SEQ ID NO: 15961 - RNA, 190 nt, unidentified
  source 1..190: mol_type = other RNA; note = Related to NZ_QJKD01000014.1; note = Hungatella effluvii
cagggaatcatagcttttccggaaccataaaggagatccggccgggcagcgagccgctgtcaggaatgtcatttttttaaggtcaaaagaccgtaatctgctccgaagtacatccgcacatttcatgtgcttacgcctgcggcttgtacatcttcgcatcttacggcatcctttttcgtatgatttcctg

SEQ ID NO: 15962 - RNA, 189 nt, unidentified
  source 1..189: mol_type = other RNA; note = Related to NZ_WNME01000006.1; note = Hungatella hathewayi
cggagattcatagcatttccagtattgcttagaggctccggccgggcagcgagtcgttgtccggaagttcacaagttaaggtcataagaccgtaatctgctccgaagtacaactgcacatttcatgtgcttacgcctgcggcttgtacgtcttcgcatcttacggcatcctttttcgtatgagtttcca

SEQ ID NO: 15963 - RNA, 188 nt, unidentified
  source 1..188: mol_type = other RNA; note = Related to NZ_QSGP01000002.1; note = Enterocloster aldenensis
agtggaatgatagcatttccggaatcctgagcggatccggccgggcagcgagtcgctgtcaggaacatcatgatagtaaggccgaaagaccgtaatctgctccaatgtacaaccgcacattccatgtgcacacgcctgcggcttgtacatctgcgcatcttacggaatccccttttgtatcatccact

SEQ ID NO: 15964 - RNA, 188 nt, unidentified
  source 1..188: mol_type = other RNA; note = Related to FOZH01000006.1; note = Enterocloster citroniae
gcagtggatcatagtgtttccggtaccacagcgggaccggccgggcagcgagtcgctgtcatggacatgtcatagcagggccgcaagaccgcaatctgctccgaggtacaaccgcacatttcatgtgcacacgcctggggcttgtacatctgcgcatcttacggtatcctttttcgtatgatccctgc

SEQ ID NO: 15965 - RNA, 185 nt, unidentified
  source 1..185: mol_type = other RNA; note = Related to NZ_FNWC01000007.1; note = Coprococcus sp.
gcaggaacgatagcatatccaagacagatgttttggcaggggagcgagtcgctgcccggtacaggagatgaaacgatgaaacgataagctgcttcgaggtacttttgcacacttcgtgtgcatggaccttgcggtccgagtacatctacgcatcttacggaatcactttattgtattgttcctgc

SEQ ID NO: 15966 - RNA, 196 nt, unidentified
  source 1..196: mol_type = other RNA; note = Related to JAGZOR010000071.1; note = Lachnospiraceae bacterium
gcagaaacaatagcagaactgaaaggacaaaatgccgtttcagcaggggagcgagtcgctgtccggtaaagtaaatgggaacatgaaacgggaagatgctgcgaagtacaaatgcacactgccgtgtgctgcggtcgctgttgcgactatggtacatcttcgcacttccggtatcaatatattgtattgtttctgc

SEQ ID NO: 15967 - RNA, 201 nt, unidentified
  source 1..201: mol_type = other RNA; note = Related to NZ_OIWX01000001.1; note = Blautia sp.
gcgggaacaatagcatatccggtatctttacgctttgctgtactgaaccggtcggggggcgagtcgccgcctgatcataaacggggagacattagacttccgaacgctccgaggtacttctgcacactgcgtgtgctgtacggccttcggcctatgtacatctgcgcattctccagaatcaccttcttgtattgttcccgc

SEQ ID NO: 15968 - RNA, 201 nt, unidentified
  source 1..201: mol_type = other RNA; note = Related to NZ_CP035945.1; note = Blautia producta
gcgggagcaatagcatatccggtatatctgtaagctgatcactgataccggtcggacggcgagtcgccgcctgatgataaattgggagaaatcagacttccgaaggctccgaggtactactgcacactgcgtgtgctgttcggcctccggcctgtgtacatctgcgcattctccagaatcaccctcttgtattgctcccgc

SEQ ID NO: 15969 - RNA, 201 nt, unidentified
  source 1..201: mol_type = other RNA; note = Related to DNJM01000030.1; note = Lachnospiraceae bacterium
gcaggagcaatagcagatccggtatgcaaggtgttgtatccggtcggacggcgagtcgccgcctgattccagaaaaagagaacataagactttcagatgctccgaggtacgtccgcacacgatgtgtgcatatggtcccggaatccgggacctgagtacatctgcgcatcttacagaatccccttattgtattgctcctgc

SEQ ID NO: 15970 - RNA, 314 nt, unidentified
  source 1..314: mol_type = other RNA; note = Related to KE159610.1; note = Lachnospiraceae bacterium M18-1
gcaggaataatagcatatccgttttcaaccgaaaggtaagaaaaggagctgtttacagagtatttctgagcagctcccagacggcagggcggcgagtcgccgtccgagaaacgatcatcagcgctccatccggaaaagggcatgtgcagaaaatctgtccgtagcagtttttccgtgctttcgccggatggagcaccggagagataagacctccggatgctccgatgtacttccgcacacttccgtgtgcttttccggcatagccttggtacacctgcgcatcctatggaatccattttttgtattgtttctgc

SEQ ID NO: 15971 - RNA, 353 nt, unidentified
  source 1..353: mol_type = other RNA; note = Related to QXWX01000071.1; note = Lachnospiraceae bacterium
gcagaagcaatagcatatccgtttttatccgaaagaaaggatcaggtgctgttcgcagagttttttgtacggctccaaaacggcagggcggcgagtcgccgtccgggaaacaatcatcagcgctccatccggacagaccatatatggaaatgcctgcggtattttttcatacagaaccatcgtatgcagaaaatctgtctgcggcagttcctctgtctttcaccggatggagcaccggggacataagacctccggatgctccgatgtacttccgcacacttccgtgtgcttttccggcatagccttggtacacctgcgcatcctatggaatccattttttgtattgctcctgc

SEQ ID NO: 15972 - RNA, 330 nt, unidentified
  source 1..330: mol_type = other RNA; note = Related to NZ_RHJS01000002.1; note = Schaedlerella arabinosiphila
gcagggacaatagcatatccgtttttcatccgaaaggaatgatcaggaacggttcgtaaaataattctgaaccgtttcctaacggcagggcggcgagtcgccgtctggaagcaatagagaactgcagaaaataactcctgcatccatgtatgtctgagttgtttttctgcagttccgatacagcgctccatccggcagaacggatggagcatcagggacagaagaccttcggatgctccgatgtacttctgcacactaccgtgtgcgtttccggcatagccttggtacacctgcgcatcctgcggaatccattttttgtattgttcctgc

SEQ ID NO: 15973 - RNA, 199 nt, unidentified
  source 1..199: mol_type = other RNA; note = Related to CP060635.1; note = Proposed Wansuia hejianensis
gcagggacaatagtatatctgggtttgcctgataactgacagcatgtccagccggatggcgagtcgccgtctggtaaagaaaaagaagccataagactttcagatgctccgaggtacttcagcacactagcgtgtgcaggcggctgcgcctgtgtacatctgcgcatcttacagaatcaccttattgtattgtccctgt

SEQ ID NO: 15974 - RNA, 200 nt, unidentified
  source 1..200: mol_type = other RNA; note = Related to CP084061.1; note = Blautia sp.
acagggacaatagcatatctggatctgtctgaaataggacagcatatccagccggatggcgagtcgccgtccggtatagaaaaagagaccaaaagacttccagatgctccgaggtacttcagcacactgccgtgtgcaggcggcttacgcctgtgtacgtctgcgcatcttacagaatcaccttcttgtattgtccctgt

SEQ ID NO: 15975 - RNA, 200 nt, unidentified
  source 1..200: mol_type = other RNA; note = Related to NZ_LT574838.1; note = Proposed Bariatricus massiliensis
acagggacaatagcacatccgggcatgtttgtacgagtacggcatatccggcggggcggcgagtcgccgtcctgcagaacaagggaaagtatgagactttcagatgctgctaggtacttcagcacactgcgtgtgcatgtcggcctgcgcctgagtaccccttcgcatcttacagaatcaccatattgtattgtccctgt

SEQ ID NO: 15976 - RNA, 197 nt, unidentified
  source 1..197: mol_type = other RNA; note = Related to NZ_CABLBR010000003.1; note = Ruminococcus gauvreauii
gcagggacaatagcatatccggatcgatacaggaatgtagagaccggccgggcggcgagtcgccgtctggtgaggaaaatcaggccatcagacttccagatgctgcgaggtacttcagcacaccggcggtgtgcatacgggcgctgccctggtacgtcttcgcatcttacagaatcatcttattgtattgtccctgt

SEQ ID NO: 15977 - RNA, 222 nt, unidentified
  source 1..222: mol_type = other RNA; note = Related to GL945165.1; note = Lachnospiraceae bacterium 1_4_56FAA
acagggacaatagcatatccattgatttttgcggcggctctgtaaggagccgccgtaagtattttgtgggcgggcggcgaaacgccgcccggaacttctaaccgaatgcaggaaactgacgccgtttccgaggcactactgcacactgcgtgtgccggatcggcttgcgcctatggtgcatcggaaccggcttacagaatctccttattgtattgtccctgt

SEQ ID NO: 15978 - RNA, 209 nt, unidentified
  source 1..209: mol_type = other RNA; note = Related to WQPN01000006.1; note = Clostridium sp.
gcaggagcaatagtgttaccggtaaactttaaatagcttccggcccggcggcgagtcgccgccgggttcatgttattcagagcaaagtctgtatatgctgcgaagtacaaccgcacacctgcggcgcttttggcgcctctggtgtgcttacgcctgcggcttgtacatctccgcatatacagtatcttcttttttagtattgcgcctgc

SEQ ID NO: 15979 - RNA, 190 nt, unidentified
  source 1..190: mol_type = other RNA; note = Related to PKUU01000015.1; note = Clostridium sp.
gcaggagcaatagtgtaaccggtttgactgaaaggattaccggcccggcggcgagtcgccgccgggaacatgatattcggaacaaagtctgtatatgctgcgaagtacatctgcacactatggtgtgcttacgcctacggcttgtacatctccgcatatacagtatcttctttttcagtattgcgcctgc

SEQ ID NO: 15980 - RNA, 202 nt, unidentified
  source 1..202: mol_type = other RNA; note = Related to AP025571.1; note = Clostridium symbiosum
gcaggaaccatagcgcagccaaagcatccgctttgggccggcggcgagtcgccgccggcggttatcaaagtcagacgcaggcagggcctgcagacttcaatttgctgcaaggtacgccgcacactttgtgtgctttctgtggctttgccacagtccggtacatcttcgcatattgaagaatctttttaagtatggttcctgc

SEQ ID NO: 15981 - RNA, 178 nt, unidentified
  source 1..178: mol_type = other RNA; note = Related to RAYU01000170.1; note = bacterium 1XD42-8
gcaaggacaatagacgatccagaaaaaactggccagggggcgagtcgccgtctggaatagaatggataggaaaaagaccccaatagcttcaatgtacttctgcacatttcatgtgctatgtgcctgcggccagtacatttacgcatattgtgatatcggataatagtattgtccttgc

SEQ ID NO: 15982 - RNA, 201 nt, unidentified
  source 1..201: mol_type = other RNA; note = Related to JAGZJZ010000010.1; note = Clostridiales bacterium
acagaggcattagtatttccggagatattttctctggccgggcagcgagtcgctgtccggatatgtatgattgaagattggtgcaggtctgcctgcacaccgtaaactgctgcgatgtacttctgcacactgcttgtgcaccgccgccttcggctcgtacagcttcgcattttacgtatcacctttttgttttgcctctgt

SEQ ID NO: 15983 - RNA, 190 nt, unidentified
  source 1..190: mol_type = other RNA; note = Related to NZ_FMJR01000027.1; note = Robinsoniella peoriensis
gcagagacattagtatttccataaattttggccgggcagcgagtcgctgtctggaattgtattcttgcagatcggtgcaggcctgcctgcacaccgtaaactgctgcgatgtacttcagcacaatgcttgtgcggccttcggttggtacaacttcgcattttacgtatcacctttttgttttgcctttgc

SEQ ID NO: 15984 - RNA, 199 nt, unidentified
  source 1..199: mol_type = other RNA; note = Related to NZ_FQVI01000010.1; note = Lactonifactor longoviformis
acagcggctgcagccaatccaaagttatttttggccggatggcgagtcgcctccccggaatcatgcaaacagtatcaggtgcagtgccctgcaccccgaaagctgcctgcaaggtacttcggcacacttcgtgtgctttggccttcggccttgtacctttccgcagctttcggtatctccttatttgtgctgccgctgt

SEQ ID NO: 15985 - RNA, 220 nt, unidentified
  source 1..220: mol_type = other RNA; note = Related to NZ_SGXF01000003.1; note = Cuneatibacter caecimuris
cgcaagacaacagtgtttctgaatacatttcagaagggcggcgagtcgccgtccgcaaagtgattggagaaggcagctgcgaagcagcggcacagttcctgtgcctgcctgcggcttgccaggtacttccgcacacggagtgtgcacggctgggcgcagagcgcccaaacgcctgagtaccaggccgcctccggcagatcttcttttggtgttgtctggg

SEQ ID NO: 15986 - RNA, 259 nt, unidentified
  source 1..259: mol_type = other RNA; note = Related to DVJD01000043.1; note = Candidatus Fimimorpha excrementavium
acagggacaacagagaaattcagttttgacagacatggtctgggaaaaagctgaccggtcggcgagtcgccgcctggaagagatggcagcctgggctgccaaatcaggaagacagaccagaagcagctccaatgtacgtccgcacatttgcgatgggaccacatttacatgtgttcccgtctccaatgtgcatgaacgccggaggcgttcggtgtacacctgcgctgcttatggaatcacctttttgtgttgcccctgt

SEQ ID NO: 15987 - RNA, 183 nt, Escherichia coli
  source 1..183: mol_type = other RNA; note = Related to CP065613.1
gcagtggcaatagcgtttccggcctttgtgccgggagggtcggcgagtcgccgacttaacgccagtagtatgtccatatacccaaagtcgcttcattgtacttaagtacgcttcgcgtacgtcgcgctgacgcgctcagtacagttacgcgccttcgggatggtttaatggtattgccgctgt

SEQ ID NO: 15988 - RNA, 180 nt, unidentified
  source 1..180: mol_type = other RNA; note = Related to NZ_BNAA01000006.1; note = Pseudocitrobacter faecalis
gcagtggcgatagcgtttctggagttatccagaagggtcggcgagtcgccgacttcacgcccgcagttcactcatatacccaaagtcgttccattgtacctcggcacgtttcacgtgcgcgcgctgtcgcgcgaagtacatttccacgccttcgggatggttttcgagtatcgccgctgt

SEQ ID NO: 15989 - RNA, 187 nt, unidentified
  source 1..187: mol_type = other RNA; note = Related to NZ_LS483470.1; note = Leminorella richardii
gcggagacaatagcgttttcaggcgcattgtcctgaacggatcggcgagtcgccgatctggcacgagcagtttggccacaaggccctaagtcattccaaagtacctcagcacgctctgcgtgcgacgcgctaacgcgctgagtacgttttcacgccttagggatcggctttatcgtattgtcgccgc

SEQ ID NO: 15990 - RNA, 185 nt, unidentified
  source 1..185: mol_type = other RNA; note = Related to NZ_JMPN01000024.1; note = Leminorella grimontii
gcggtagcaatagcgttttcagacgttctcgtttgaacgggtcggcgaatcgccgactttacgcaagcagcttggcccatataccctaagccgcgtcaaagtacatcagcacgctttgcgtgcgacgcgcttacgcgctaggtacgtttccacgccttagggatcgcttatcgtattgccgccgc

SEQ ID NO: 15991 - RNA, 175 nt, unidentified
  source 1..175: mol_type = other RNA; note = Related to NZ_RBIZ01000005.1; note = Yokenella regensburgei
agcagcagacgcagctttcccagtgaaatcactggcggagcggcgagtcgccgttctgtatttatttctgcgacattgaccctaaggtgttccggagtacgacagcacactacgtgtgcgcgcttcgcgaaggtacaccttcacaccttacggaatcattttgtggtgcgctgct

SEQ ID NO: 15992 - RNA, 174 nt, Enterobacter sp.
  source 1..174: mol_type = other RNA; note = Related to OBEF01000007.1
agcagaagcagctttcccggttgaaacaactggcggagcggcgagtcgccgttctgtactgactacctgcaacgctgaccctaaggtgctccggagtacggctgtacacgttgtgtacccgcttcgcgaatgtacaccttcgcaccttaaggaatcattttgtggtgctctgct

SEQ ID NO: 15993 - RNA, 180 nt, unidentified
  source 1..180: mol_type = other RNA; note = Related to NGMM01000007.1; note = Enterococcus sp.
acagagatgatagcgcatgcgatcgtccagatcgatctgatggtgagtcaccatcggagaggaataagggattatattcactgtaagctgatcaatgtacgcccgcacatttcatgtgcttccgccttcggctttgtacatctcacaacttacagtatcgaatttttgtgtcgtctctgt

SEQ ID NO: 15994 - RNA, 180 nt, unidentified
  source 1..180: mol_type = other RNA; note = Related to WLYM01000046.1; note = Erwinia sp.
aaagagagaatagcataactgaaacttgctttcagcctgatggtgagtcacctttgggaaaaaataatcgtgaatagtttcctgtccctcgttcaaggtacgaccgcacactacatgtgccgcgcctttggctaggtacctcttacaaggaacaggatcgttttttagtattctctctcc

SEQ ID NO: 15995 - RNA, 179 nt, unidentified
  source 1..179: mol_type = other RNA; note = Related to NZ_NGKC01000006.1; note = Vagococcus acidifermentans
aatgaggagatagccaatttgattgaaatcaattcaagagcgagtcgctcttgaaaaatagcacgggagcgattgttactgtaattcgttcaatgtgcttcagcacatgatatgtgctacagtctgcgacgacgcacatctcgctcattacagcatcatttttaagtatctttctcatt

SEQ ID NO: 15996 - RNA, 180 nt, unidentified
  source 1..180: mol_type = other RNA; note = Related to NZ_FYBT01000001.1; note = Listeria goaensis
gaagaggcaatagtttgtctaatcacatagttagacaaggatggcgagtcgtcatctgaacacaagaattcgagcattagccataaaatgctacaatgtacaactgcacattaaaatgtgctggcctgtcggcaagtacatctccgcattttacggatcgatttttagtattgcctcttt

SEQ ID NO: 15997 - RNA, 179 nt, unidentified
  source 1..179: mol_type = other RNA; note = Related to KQ130610.1; note = Listeria fleischmannii
tgagaggcaaaaggatgtctattaaccgaataggcgaggatggcgagtcgtcatctggatttagaaatgtatagattagccaccaaatgcgaaggtgtactacagcacatttcatgtgcctcgccaagtggcaagtacacctctgcatttgatggatcggtttttcgttttgcctcttt

SEQ ID NO: 15998 - RNA, 185 nt, unidentified
  source 1..185: mol_type = other RNA; note = Related to NZ_FXUT01000001.1; note = Listeria costaricensis
gaagagatcctagcaaaaaccggaattcattctggatctgttggcgagtcgccaccggataagtttctttatcggttagccgcgatctgctttaaagtactaccgcacactgcatgtgcgttcgccgacaagcggctagagtactttgacgcgactcacggttcgctttttagtaggatctcttc

SEQ ID NO: 15999 - RNA, 184 nt, unidentified
  source 1..184: mol_type = other RNA; note = Related to JAJFDR010000002.1; note = Anaerovorax odorimutans
acagagacaatagcgaagccggactttgtttcgggcgggcggcgagtcgctgtctgtatggtgagtatgagcagatcagaccgaatccggctgagatgtacttctgcacatttcatgtgcagaccttgcggtcttaggtgtacatcggcgcagattcggaattttcattttgtattgtctctgt

SEQ ID NO: 16000 - RNA, 229 nt, unidentified
  source 1..229: mol_type = other RNA; note = Related to DVGX01000291.1; note = Candidatus Ventrisoma faecale
acagaggcaatagctcagtcagacattcaatgcggcatgcagggataatctggcccgtcggcgagtcgccgccgggaggaaacacacaaggacgcgcaggcccgcagggccagcgaccataatctactgcgaagtacgccggcacacggatgtgtgcacggaccgcatgtcccatgcggtatggtacgtctgcgtatcttatggaatccttttctagtattgcctctga

SEQ ID NO: 16001 - RNA, 199 nt, unidentified
  source 1..199: mol_type = other RNA; note = Related to LR134531.1; note = Pragia fontium
atagaggcaatagcttattcagatagaattatctggatccgttggcgagtcgtcaccggataatcgatatagctaagttatgccagaccataagctgctgcaaagtacctcagcacactttgtgtgcgacgccttcggttgacctccggctgagtacgtctccgcagcttacggtatcgttttatagtattgtctctat

SEQ ID NO: 16002 - RNA, 183 nt, unidentified
  source 1..183: mol_type = other RNA; note = Related to PDDX01000001.1; note = Budvicia aquatica
atagaggcaatagcttatccggggaatcttatccggatccgctggcgagtcgtcaccggataatcgatatctgagctatagaccctaagttgctccgaagtacctcagcacacttcgtgtgcgacgcctttggctgagtacgtctgcgcaccttagggtatcgttttatagtattgcctctat

SEQ ID NO: 16003 - RNA, 194 nt, unidentified
  source 1..194: mol_type = other RNA; note = Related to NZ_PQSP01000009.1; note = Saezia sanguinis
gcagaggcaatagcttatccggatgagtcaacctcatctgggccggcagcgagtcgttgccggtaaatggttacctggaaaactcagaccatcatatgctccaatgtaccgctgcacattgcatgtgcgcatagccttcggcttttcggtacacctccacatatgatggaatcactttagcgtattgcctctgc

SEQ ID NO: 16004 - RNA, 182 nt, unidentified
  source 1..182: mol_type = other RNA; note = Related to JAFYPD010000088.1; note = Peptococcaceae bacterium
gcaggaacaatagcctatctgaatggatgcattcagcctgacggcgagtcgccgccgggaattcgcaagctgccagatgcagaccatctttgctccaaggcacatccgcacacttcgtgtgcaattgcatttcatgtgcccctccgcatgcgatggaatctctctttttgtattgttcctgc

SEQ ID NO: 16005 - RNA, 136 nt, unidentified
  source 1..136: mol_type = other RNA; note = Related to JAFRDE010000015.1; note = Ruminococcus sp.
tcttttgcggcagagtacatctttgatttttcaaaggacggacagcgagtcgctgcccgggttttacgaaaagcctcgcattccgcctgcggcgtaatgcgtacaccgcttatgcggatagttagtgccgcaaaga

SEQ ID NO: 16006 - RNA, 137 nt, unidentified
  source 1..137: mol_type = other RNA; note = Related to JAFRBD010000130.1; note = Ruminococcus sp.
tcttttgcggcagagtacatctttgatgtttcaaaggacggacagcgagtcgctgcccggggtttatgtgaagcctcgcattccgcctgcggcgtaatgcgtattccgcgtacgcggatagttagtgccgcaaaagc

SEQ ID NO: 16007 - RNA, 140 nt, unidentified
  source 1..140: mol_type = other RNA; note = Related to JAFRBX010000029.1; note = Ruminococcus sp.
ctttttgcggcagagtacatctttgatttgtttcagaggacgggcggcgagtcgctgtccgggcatcacgagaaaccgcgcattccgcttgacgcgtaatgcgacaaccgcctgaggcggatagttagtgccgcaaaagc

SEQ ID NO: 16008 - RNA, 189 nt, unidentified
  source 1..189: mol_type = other RNA; note = Related to JAFORM010000263.1; note = Ruminococcus sp.
gttttcgcggcagcgaacatctttgtttttcaaaggacgggcagcgagtcgctgtccggttttattactgcggcgttccttttccgtgaaaaggaacgttccgcaaatcttctccgctgagagtggaaaatcacttcatgatttatttctcagctccgcagctttgcggtcattgagtgccgcgaaaac

SEQ ID NO: 16009 - RNA, 177 nt, unidentified
  source 1..177: mol_type = other RNA; note = Related to JAFOUX010000084.1; note = Ruminococcus sp.
tgagaacagcaaaacggttttatgaggacggtcagcgagtcgctgtccggatagagagtaagatcagtattcgcgcggcgaatacgaagccgcaaatccgctccgccgaattaaagttcgctgcacgaactaaagattcgtctgcacggctttacggacatttagtatcagctcacg

SEQ ID NO: 16010 - RNA, 189 nt, unidentified
  source 1..189: mol_type = other RNA; note = Related to JAFUNJ010000009.1; note = Clostridia bacterium
tctttcgcagcagcgtacacaccgtttttgcggaaagggcagcgagtcgctgctttgttggtttgcccgggagcatcgcgtttgttttgaaaaacaaacgctgcctgaaaatgcctcaacgagcaaaaaaatcattccatgattgtctgctcgcctcgccatattcaggacttttcgtgctgcgaaaga

SEQ ID NO: 16011 - RNA, 188 nt, unidentified
  source 1..188: mol_type = other RNA; note = Related to JAFSIW010000012.1; note = Clostridia bacterium
ctttttttggtagtgaaccatcttgttttggcaagagcggtcagcgagtcgctgtaccgaggctttgaagtccctccgccatcctgcggatggcacatgcccgtaaaaatgctctcggtgaatgaaaaatcactgcgtgattagcaattcaccttcgcatattcacggaatttttgtaccaaaaaaag

SEQ ID NO: 16012 - RNA, 183 nt, unidentified
  source 1..183: mol_type = other RNA; note = Related to JAFNUN010000059.1; note = Clostridia bacterium
tcagccacaatagtgtagaacttgcttttttgcgagtgtaggcggcgagtcgccgttttgctttatttatttagaacgtaaatcttagaatttacccaaagaatacgctacaatgaaccaagaatcactgcgtgatttaaagttcatcttcgctttattcttaacattatgtgttgtggctga

SEQ ID NO: 16013 - RNA, 189 nt, unidentified
  source 1..189: mol_type = other RNA; note = Related to JAFSEL010000040.1; note = Ruminococcus sp.
tctttcacaatagcgcacatcttaaaaaagttttaagaggggacagcgagtcgctgttctgttaattttaaattgagatagaacattccttagaatgttcgtaccaaacaacgctcctatgactaagaaatcattttatgattcagaagtcacatccgcttgtgtttggacattttgtattgtgaaaga

SEQ ID NO: 16014 - RNA, 193 nt, unidentified
  source 1..193: mol_type = other RNA; note = Related to SVPW01000009.1; note = Oscillospiraceae bacterium
cttttcacggtagtgtacatcttgtttacaagagggaacggcgagtcgccgtttcgttagttttcttgggatagccattttgtttaaaaaacaaaatggcattctccgcacatcgcttcatcgacattcaaatcacttcgtgattatctactgtcgactttagctatgttcggggattttgtaccgtgaaaag

SEQ ID NO: 16015 - RNA, 200 nt, unidentified
  source 1..200: mol_type = other RNA; note = Related to JAFUKO010000119.1; note = Ruminococcus sp.
tcgcttgcagtagtgtaaatctctttgatttttttcaagggagggacagcgagtcgctgtttcggttttttaaaaaatgcgggctacggcttttgctcacaaaagccggctccaaattgctcttcgatgacatacaaatcactacgtgattagaaaaatgtcatctgcgtttaaatttggtcattttgtactgcgagcgg

SEQ ID NO: 16016 - RNA, 193 nt, unidentified
  source 1..193: mol_type = other RNA; note = Related to JAFOED010000001.1; note = Ruminococcus sp.
ctgtctgcagtagcttacagcttaatgaattttaagcaggggtcagcgagtcgttgtcctgtgtgttaaaaaaatcgggtatagcttttgctatgcaaaagcgcagccaaaagtcgcttcggtgacataaaaatcactttgtgattaaaaatgtcactttcgctttattttggtcattttgtgctgtggacgg

SEQ ID NO: 16017 - RNA, 193 nt, unidentified
  source 1..193: mol_type = other RNA; note = Related to JAGBTD010000211.1; note = Clostridia bacterium
tcctcgacagtagttaacaacttttatctttatgatttaagtgaggtcagcgagtcgctgtcctgtgtttttaaccttcttccgcattgctgaacgcaatgcgcacatccgattaatgctccgtcgaacaaccaatcatttcatgatttcaggttcgcctccgcatcaaccgggcagaaagtactgtcgaggg

SEQ ID NO: 16018 - RNA, 190 nt, unidentified
  source 1..190: mol_type = other RNA; note = Related to SVPP01000010.1; note = Oscillospiraceae bacterium
accccgacaacagcgaacaatcccgccaaaagcaggaaggggcagcgagtcgctgtcttgtatattttttctcgggactgcgttttacaagtaaaacgcttgccgataatttcactacgccgaatcagaaatcacttcgtgattagaaattcgtcttcgttcattaccggacattttgtgttgtcggggt

SEQ ID NO: 16019 - RNA, 185 nt, unidentified
  source 1..185: mol_type = other RNA; note = Related to SVJN01000007.1; note = Oscillospiraceae bacterium
tattttacaacagtgtacaacctgatttattcaggagggggcagcgaggtcgctgtctcggatttacgcaaggttcgcatggcactctgcgagtgcgcctgaaagaaactccatcgaataaaggaatcaccttgtgatttaatattcgcctccgtttctttcagagaaaagtgtgttgtaaaagc

SEQ ID NO: 16020 - RNA, 186 nt, unidentified
  source 1..186: mol_type = other RNA; note = Related to QUJR01000007.1; note = Butyricicoccus sp.
ccctttgcagtagcgtacaacctaaagccaatttctttaggagggacagcgagtcgctgttctggatttcaaggttatccgcatcgcatagcgatgcccaaatctgatacgctccggcgaatagccaatcacttcatgattctcgattcgcctccgcttaatcagaccattttgtactgcaaaggg

SEQ ID NO: 16021 - RNA, 201 nt, unidentified
  source 1..201: mol_type = other RNA; note = Related to DMLP01000060.1; note = Oscillospiraceae bacterium
ctccttgcagtagcgtacatcttaaagcgtaactttgagagggacggcgagtcgctgccctgattttctaaaggatttatgccttgccgcagatatatccgcggcaaggcgccgcccgataacactccgacgaacaaaagaataactccgttattttcagttcgcctgcgcttttatcgggtcattttgtactgcaagggg

SEQ ID NO: 16022 - RNA, 193 nt, unidentified
  source 1..193: mol_type = other RNA; note = Related to JACJKY010000027.1; note = Proposed Phocea massiliensis
ttctttgcagtagtgtacatcttaaagcattctttaagaaagggcagcgagtcgctgctttggtgatgaaactgagtgacgccttttcgctgacgaaaagcgcctacctgataacgcttcaacgaataccgattaactgcgttaataaaagattcgttttcgcttatatcaggatattttgtactgcaaagaa

SEQ ID NO: 16023 - RNA, 189 nt, unidentified
  source 1..189: mol_type = other RNA; note = Related to NZ_AP023418.1; note = Vescimonas coprocola
ccccgcgcagtagtgtacagcttaaagtttcgtactttgaggagggtggcgagtcgccgctctgtttaccaagaggacgcacgcttcgcaagcgaagcgaccgcctgataccgctccatcgaatcgcgaatcacgccgtgattagaaattcgactccgcttatatcaggtcactttttactgcacgggg

SEQ ID NO: 16024 - RNA, 191 nt, unidentified
  source 1..191: mol_type = other RNA; note = Related to DVGI01000013.1; note = Candidatus Fimenecus excrementavium
ccttttgcagtagtgtacatcttaaagctttctttaagaggggcagcgagtcgctgtcttgttctcaaaaaaacggggtctcattttgcacgcaaaatgcacgcctgacgtcgcttcggcgaattcaataatcacttcgtgatttaccattcgcctgcgcttcttgtcaggacacgtagtactgcaaaagg

SEQ ID NO: 16025 - RNA, 194 nt, unidentified
  source 1..194: mol_type = other RNA; note = Related to SVPJ01000007.1; note = Oscillospiraceae bacterium
ttcttttccgcagcgtacatcttaaagtgttctttaagagggggcagcgaagtcgctgtttcgttttcaaacctgcattgcgctttcggtcaaaaccgaaagcgccgccctgatgtcgcgccgtcgagtaaccaatcacttcgtgatttcaaactcgcctttgctcgtatcaggacattttgtgcggaaaagag

SEQ ID NO: 16026 - RNA, 191 nt, unidentified
  source 1..191: mol_type = other RNA; note = Related to SVPN01000018.1; note = Oscillospiraceae bacterium
acggtcgctgtagtgtacagtctttgtattttcagagaggggacggcgagtcgccgtcttgttaacggaaaagaggtccggcactcgcgtgacgagtgctgactccgaataccgctccgacgaacaacaaatcactgcatgattttaaggttcgcctccgcttgtattcgggcaatttgtacagcgaccgt

SEQ ID NO: 16027 - RNA, 139 nt, unidentified
  source 1..139: mol_type = other RNA; note = Related to NFIH01000004.1; note = Pseudoflavonifractor sp.
tgctttgcggtagagtacagggaacgaaaggttcaaggggcggcgagtcgccgtctggggtttcgatgcagtgttcgactttgactgggcaaagtcggtggcttgaatggatattcaagtattttggtaccgcaaggaa

SEQ ID NO: 16028 - RNA, 203 nt, unidentified
  source 1..203: mol_type = other RNA; note = Related to JAFQCR010000001.1; note = Clostridia bacterium
ttccctgcggcagcgtacatcttgaagtttctttaagaggggcggcgagtcgccgtcttgtgtttttacccgagcttctgcaaacgttattgcttcgcaatcacgtttgcagcccgcctgataacgttacatcgaactgatggtcacttcgtgaccaaaaggttcgccttctcttttatcaggtcattttgtgccgcagggta

SEQ ID NO: 16029 - RNA, 200 nt, unidentified
  source 1..200: mol_type = other RNA; note = Related to JAGAOS010000040.1; note = Clostridia bacterium
cttcttgcagtagcgtacatcttattttaagaatgggcggcgagtcgccgttcctgtgttttaaagggaattaccaatacggtctgcgtgttacgccacccgtattggcttttcataagaccgcttatagcgaataaatggtcacttcatgacctataaattcgctaacgctttcttatgtgattttgtactgcaggaag

SEQ ID NO: 16030 - RNA, 190 nt, unidentified
  source 1..190: mol_type = other RNA; note = Related to JAFVIF010000076.1; note = Clostridia bacterium
cctcttgcggtagcgtacgtctaaagcttgctttagggaggtcggcgagtcgccgtcctgttattctaaccctcaccgcttcgctaaaaagcgaagcgcatttccggataacgctgcggcgaataacccaatcatttcatgatttcaaattcgcctacgcttttatcaggacattttgtaccgcaagggg

SEQ ID NO: 16031 - RNA, 218 nt, unidentified
  source 1..218: mol_type = other RNA; note = Related to SVOI01000004.1; note = Oscillospiraceae bacterium
cactctacagtagtgtaaaatacttaaagttatctttaagtaaggtttaaaagaatagtcttggtgcctacagtgagcgaagtcgctctctgatgaactaaaaacttggaaatttcggcctccgccggttctcctgataacgctccaacgaataaaatgtcacttcgtgacacgcaattcgcctccgcttttatcaggtgagattgtactgtagagtg

SEQ ID NO: 16032 - RNA, 193 nt, unidentified
  source 1..193: mol_type = other RNA; note = Related to SVOH01000020.1; note = Oscillospiraceae bacterium
ccccttgcagtagcgtacatcttaaatgcaaatttaagcggggcggcgagtcgccgtctggattttttaaaaagggataactgcaagactacgtcttgcagccacctgataaacgctttgtcgaatttaatgtcactgcgtgacaaaaccattcgccgccgcttacttatcaggaattttgtactgcaagggg

SEQ ID NO: 16033 - RNA, 172 nt, unidentified
  source 1..172: mol_type = other RNA; note = Related to JAFOYN010000067.1; note = Clostridia bacterium
cccttttcagtagcgtacagcttgaagcaattcaagacgggcagcgagtcgctgtctgaggtttttgatggcccgtatccgcacgataaatccttcaatgggctcaatttttacttgcgtaaaaacaaaggcccaccttcgtatttatcatgtcattttgtactgaaaaggg

SEQ ID NO: 16034 - RNA, 187 nt, unidentified
  source 1..187: mol_type = other RNA; note = Related to JAFOFE010000078.1; note = Clostridia bacterium
ccctttgcagtagtgtacaacttgaagtatttcaagacgggcagcgagtcgctgttcggggtttttaaacctagcagtatttcttacgaaataccacctcctgataaatacttcaatgggcagcccgttatttcataacgtcagggcccaccttcgtatttatcatgtcattttgtactgcaaaggg

SEQ ID NO: 16035 - RNA, 172 nt, unidentified
  source 1..172: mol_type = other RNA; note = Related to JAFXAP010000013.1; note = Clostridia bacterium
ccccctacagtagcgtacagcttgaagcgattcaaggcgggcagcgagtcgctgtctgaggcacatttccgagccgagtttctcacctgataaatccttcaatgggtcatccgttattccataacgccacacccatcttcgtatttatcatgtcatttagtactgtaggggg

SEQ ID NO: 16036 - RNA, 187 nt, unidentified
  source 1..187: mol_type = other RNA; note = Related to JAFTLW010000024.1; note = Clostridia bacterium
ccccttacagtagtgtactacttgaagaaattcagggcggacagcgagtcgctgtctgtggcatattccgggtccgcgtttctaagcgaaacgcgccgcctgacaaacactgcaatgggctaaattttactacgtaaaaaagaccgcccacctccgtatttatcaggacattttgtactgtaagggg

SEQ ID NO: 16037 - RNA, 184 nt, unidentified
  source 1..184: mol_type = other RNA; note = Related to SVRX01000013.1; note = Oscillospiraceae bacterium
ccctttgcagtagagtacatcttgattaaagtttcaagacggtcagcgagtcgttgatcggtgtttattccctcgtgtgcggcatagccgcgtgcttgaaaaaaatctccatcgagccgctgagttacctccggtaactcagactctcgtcgatttttcccaagtcattttgtactgcaaaggg

SEQ ID NO: 16038 - RNA, 182 nt, unidentified
  source 1..182: mol_type = other RNA; note = Related to JAFVQI010000036.1; note = Clostridia bacterium
ccccccacagtagcgtacagcttgaaaaccgattttcaaggcgggcagcgagtcgctgtctgaggtccctgagggatccggccgttccggccatccacgataaatcctcgatgggttcccattttcttccgaaaataaccacccaccttcgtctttatcgtgtccttttgtactgtgggggg

SEQ ID NO: 16039 - RNA, 189 nt, unidentified
  source 1..189: mol_type = other RNA; note = Related to JAGBGQ010000166.1; note = Clostridia bacterium
atccttacagtagcgtacaacttgatttttcaagacggacagcgagtcgctgttcgaggtttttaaggtgatacgatattgaattacattcaatatcgccccatgacacttccttgatgagcagccaatcacgtatgtgatttttcggctcatctgcgtcggtatcatgacattttgtactgtaaggac

SEQ ID NO: 16040 - RNA, 201 nt, unidentified
  source 1..201: mol_type = other RNA; note = Related to SVPL01000026.1; note = Oscillospiraceae bacterium
ctctttgcaatagtgattgacttgattttatcaaggcgggggtggcgagtcgccacttaaggattttaaagtggattacgcttttcagtttttataaaaacctgaaaagcgccgctgtaaaccgcttctttgaacacagtaatcactgcgtgattttaagttcaactacgcttgtttacagtgcttttgtattgcaaagag

SEQ ID NO: 16041 - RNA, 167 nt, unidentified
  source 1..167: mol_type = other RNA; note = Related to RKDE01000011.1; note = Clostridiales bacterium
gcagctatgatagcgattaccttaagcagtgtaaggttggacagcgagtcgttgcccataataaacaattaagcacaacaaataaacaaagtttcgctgaattaaaaattgctaccacaattcagaattcacctcaacttatgttttatcgaaagtatcatagctgc

SEQ ID NO: 16042 - RNA, 173 nt, unidentified
  source 1..173: mol_type = other RNA; note = Related to JAFUWO010000134.1; note = Eubacterium sp.
acagctatggtagcgattaccttgattgatattaaggttgagtggcgagtcgccattcataatgatatatttgaaagatactgacgaacacagcctcaacgaattccaaatagcgctgaagcactattcaaaattcgcctcggctatgtccgtatctaaagtaccatagctgt

SEQ ID NO: 16043 - RNA, 156 nt, unidentified
  source 1..156: mol_type = other RNA; note = Related to NZ_HG005285.1; note = Candidatus Stoquefichus massiliensis AP9
ttatgaacaatagtgatatacgaaactttagcgagtcgctaaagaatgagaaaaataaagacatggaaattgtcatattccaaggggcttaactacacgagacatgtagagtcaccgcccatttccatatgacaatatcatttgtattgttcagca

SEQ ID NO: 16044 - RNA, 166 nt, unidentified
  source 1..166: mol_type = other RNA; note = Related to NZ_LN852692.1; note = Candidatus Stoquefichus sp. SB1
ataagaacaatagtgaaaggaatatacctcctttagcgagtcgttaaaggtcaagaagaattatgatatggaattgttatatttcaatggacttaactacactaacatgtagacgctaacgcttcggcccatttccatataacaatatcgtaagtattgttcttat

SEQ ID NO: 16045 - RNA, 180 nt, unidentified
  source 1..180: mol_type = other RNA; note = Related to DVII01000099.1; note = Candidatus Coprovivens excrementavium
acaagagcagtagtgattggaattttataaaaaaaaattccccctttaatgagtcattaaagatcaaagtaacatttaagattgaattgtaatattccataagacttctctacactgcgtgtagaaacgctgacgcttacgtcgaattccatattacaatatctgaagtattgctcttgt

SEQ ID NO: 16046 - RNA, 168 nt, unidentified
  source 1..168: mol_type = other RNA; note = Related to DVML01000007.1; note = Candidatus Fimihabitans intestinipullorum
gattttgcagtagtgattggaattatttcctactttaacgagtcgttaagggactagattgatgataacgataaaattgtaatattccaaaggactaacctacacggtgtgtaggcgcttcgctttaagtccatttccatattacaatatcgctagtactgcacacag

SEQ ID NO: 16047 - RNA, 177 nt, unidentified
  source 1..177: mol_type = other RNA; note = Related to JAFRQS010000031.1; note = Bacilli bacterium
acctgtgcagtggcgattggatttatttctactttaacgagtcgttaagggacaatattaattaagatgattaaattataattctccaaaggactaaactacatttcatgtagacgcttcgttgcactacgctttaagtccatttccaaattataatatcattagcactgcataaaa

SEQ ID NO: 16048 - RNA, 179 nt, unidentified
  source 1..179: mol_type = other RNA; note = Related to FR887372.1; note = Clostridium sp.
attctcggcagtggtgattggaattatttcctactttaacgagtcgttaagggactaatttatttaagatgatttaatagtaatacttcaatgaacttacctacatttcatgtagtcgcttcgctatgctacgctttgagttcatctccatattacaatatcatgagcactgcaatagt

SEQ ID NO: 16049 - RNA, 180 nt, unidentified
  source 1..180: mol_type = other RNA; note = Related to DLWG01000243.1; note = Firmicutes bacterium
ttttatgcagtagtgattggaattttttttcctactttaacgagtcgttaagggacgatatttatttaagagattgaatagtaatattccaagggacttatctacaccttgtgtaggcgctacgcgatgcttcgctttaagtccatctccatattactatatcattagtactgcatatat

SEQ ID NO: 16050 - RNA, 164 nt, unidentified
  source 1..164: mol_type = other RNA; note = Related to JAFRAB010000047.1; note = Erysipelotrichaceae bacterium
acagttgcagtagtgattggagcaattcctgccttagcgagtcgttaagggacagttttattaccgggatcaattgcaatatttcagtgggcgacactacatttcatgtaggaggcttcgcttcgcccacttccatatttcaatatctttagtactgcagaagg

SEQ ID NO: 16051 - RNA, 164 nt, unidentified
  source 1..164: mol_type = other RNA; note = Related to JAFWHJ010000089.1; note = Erysipelotrichaceae bacterium
acaattgcagtagtgattggagcaattcctgccttagcgagtcgttaagggacagttttattaccgggatcaattgcaatattacagtgggcgatactacatttcatgtaggaggcttcgctccgcccacttccatatttcaatatctttagtactgcagaagg

SEQ ID NO: 16052 - RNA, 166 nt, unidentified
  source 1..166: mol_type = other RNA; note = Related to JAFTRC010000024.1; note = Bacilli bacterium
ttttgagcaatagtgtatggatttattccaactttaacgagtcgttaaagtacgattttaactataatatataattgtaatattccaaaggaccaacctacaccctgtgtagtcgcttcgcttttagtccatttccatattacaatatcttaagtattgctctaaa

SEQ ID NO: 16053 - RNA, 166 nt, unidentified
  source 1..166: mol_type = other RNA; note = Related to JAFQQQ010000003.1; note = Bacilli bacterium
tttcgagcaatagtgtatggatttattccagctttagcgagtcgttaaagtacgtttttaactataatataaaattgtaatattccaaaggaccaacctacacgctgtgtagtcgctacgcttttagtccatttccatattacaatattttaagtattgctcttaa

SEQ ID NO: 16054 - RNA, 173 nt, unidentified
  source 1..173: mol_type = other RNA; note = Related to JAFQTN010000005.1; note = Bacilli bacterium
tcagtatcaatagcgtttggattttctaatccactttagcgagtcgttaaagcataaaatttattaatatgatgaattgtaatactccaatggacctaactacactacgtgtagcgcggcttcgccttatagtccaattccatattacaatatcactaatgtattgatactac

SEQ ID NO: 16055 - RNA, 171 nt, unidentified
  source 1..171: mol_type = other RNA; note = Related to HF998250.1; note = Coprobacillus sp.
tattaagcaacagcgaataggaattaattattcccactttagcgagtcgttaaagttctaaaataatatagataatgattgaactattccagtggagtatactacatttcatgtagccgctaacgcttctctccaccttcatatttcaatatcactaagtgttgctaaaag

SEQ ID NO: 16056 - RNA, 158 nt, unidentified
  source 1..158: mol_type = other RNA; note = Related to HF993109.1; note = Mycoplasma sp.
aatcaagcaatagcaattggttttaaaccactttgatgagtcatcaaggatatttaattaaagaattatgtgattatattactccaagtgattactctaaacgttatttagttaaatcactctccataatataatatcacatcaagtattgcttattt

SEQ ID NO: 16057 - RNA, 173 nt, unidentified
  source 1..173: mol_type = other RNA; note = Related to DVMT01000048.1; note = Candidatus Aphodocola excrementigallinarum
tgtaagcaagtagcgttttgattttttttaaaaatctttttagcgagtcgctaaagtaagaaacactaaataaatacattatattgataacgctcaatgtatcatattacgcttaaaagcgtaaatgaaacatacatttcgctagttacaatatattatagtacttgctttat

SEQ ID NO: 16058 - RNA, 195 nt, unidentified
  source 1..195: mol_type = other RNA; note = Related to HF990861.1; note = Firmicutes bacterium CAG:822
gtaagagcaatagtggtttgaaaattatttcatactttagcgagtcgctaagggactagattaagtgttacaataatgattatagaatttaaatcattatgattgtaatattccaccgtgcttaactacactacgtgtagtcgcttacgctttatgcacgttttcatattacaatatcttgggtattgctctttt

SEQ ID NO: 16059 - RNA, 181 nt, unidentified
  source 1..181: mol_type = other RNA; note = Related to SVAM01000009.1; note = Firmicutes bacterium
aggaaagcagtagatttatctaatttatttagatagaaagacgagtcgtctgttcgaaaagaatttattatacatatttgcttatattgtacgaagtagagcgcctaaaggctatagtatatttccaatatacttatctacatcttaacaatacaagataattttaaagtactgctttttt

SEQ ID NO: 16060 - RNA, 159 nt, unidentified
  source 1..159: mol_type = other RNA; note = Related to JAFWVI010000074.1; note = Ruminococcus sp.
cagccgtcggcagtgaatttgcacaagcaaagctgcggcgagtcgccgcggatgattttaggaataagaccgatataaaaagttcttcaccgaatccaaattaactgcgttaataaaaattcggctccgaacattttaatgcttttgtgccggcggctg

SEQ ID NO: 16061 - RNA, 160 nt, unidentified
  source 1..160: mol_type = other RNA; note = Related to FPJT01000001.1; note = Ruminococcus flavefaciens
cagccgtcggcagcgaatttgcacaagcaaagctgcggcgagtcgccgcggatgatttcaggaatattaccgatataaaaagttctccaccgaatcatgaattaacttcgttaatagaaattcggctccgaacattttaatgcttttgtgccgtcggctg

SEQ ID NO: 16062 - RNA, 159 nt, unidentified
  source 1..159: mol_type = other RNA; note = Related to JAFTYF010000065.1; note = Ruminococcus sp.
cagccgttggcagcgaatttgcacaagcaaaactgcggcgagtcgccgcgggtgattttaggactaagatcaaaataaaaagttctccaccgaatccgaattaactgcgttaataaaaattcggctccgaacgttttaatgcttttgtgccggcggctg

SEQ ID NO: 16063 - RNA, 160 nt, unidentified
  source 1..160: mol_type = other RNA; note = Related to NZ_JAEF01000007.1; note = Ruminococcus flavefaciens
cagccgttgacagtgaatttgccaagcaaaactgcggcgagtcgccgcggcattttttaggaataagaacataagcaaaagtttctccgccgaataaaatattaacggtgttaatttaaattcggctccgaaacatttgaatgctttgtgtcaacggctg

SEQ ID NO: 16064 - RNA, 159 nt, unidentified
  source 1..159: mol_type = other RNA; note = Related to JAFPPE010000436.1; note = Ruminococcus sp.
cagccgccggcagcgtatttgtaaaggcaaaactgcggcgagtcgctgcggcttttttcagaattatgtccattatcaaaagtttttcactgaataactgctaacgctgttagctataaattcagtttcaaaacatttgaatctttgtgccggcggctg

SEQ ID NO: 16065 - RNA, 172 nt, unidentified
  source 1..172: mol_type = other RNA; note = Related to JAFXEJ010000141.1; note = Ruminococcus sp.
cagctgtcggcagcgaatttgcaaatgcatctgcaatgcattactgcggcgagtcgccgtggggatttttaggaataagtccataatcaaaagtttctccaccgaatttaaattaacttcgttaatacttattcggttgcgaaacatttgaatgcttttgtgccggcagctg

SEQ ID NO: 16066 - RNA, 173 nt, unidentified
  source 1..173: mol_type = other RNA; note = Related to JAFVBU010000121.1; note = Ruminococcus sp.
cagctatcggcagtgatattgcaaatgcatttccgcaatgcacgactgcggcgagtcgccgtggagttatcaggaatgagcccattatcaaaggtttctccgctgaataataaattaactgcgttaatagaaattcagctccgaaacatttgaatgttttgtgccgatggctg

SEQ ID NO: 16067 - RNA, 173 nt, unidentified
  source 1..173: mol_type = other RNA; note = Related to JAGAMS010000071.1; note = Ruminococcus sp.
caactgtcggcagcgatattgcaatgcgtaactgcaagcgcataactgcggcgagtcgccgtgggtttttttaggaacaagtccattatcaaaggtttctccactgaatctaaattaacttcgttaattataattcagctccgaaacgtttgaatgttttgtgccaacagtat

SEQ ID NO: 16068 - RNA, 163 nt, unidentified
  source 1..163: mol_type = other RNA; note = Related to UETD01000003.1; note = Ruminococcus flavefaciens
cgggctgcggcagcgtaacgcatgatgtgcgactgcggcgagtcgccgcggaaatcatttaaaaccacggactttatcacaagtttctccgacgaattccaattaactccgttaataataagattcgtctccgaaacatatgaatgttttgtgccgcagcctg

SEQ ID NO: 16069 - RNA, 164 nt, unidentified
  source 1..164: mol_type = other RNA; note = Related to NZ_ATAX01000036.1; note = Ruminococcus flavefaciens
agggctgcggcagcggtgcacatgatgcgcgactgcggcgagtcgccgcggaagatcattctcaggtaaggactttgtcataaattcctccgacgaatttcaattaacttcgttaataaggttattcgtctccggaacatatgaatgttttgtaccgcagcctt

SEQ ID NO: 16070 - RNA, 159 nt, unidentified
  source 1..159: mol_type = other RNA; note = Related to JAGPNI010000006.1; note = Ruminococcus sp.
cagctgccggcagcgttttgcactgcatacagcggcgagtcgccgctgggctttcaggagtatccacatgagcaaatgcctgctccgctgaataattccgtcaactgtgttgactaaaattcagctccccagcatttgaatgatctgtgccggcagcct

SEQ ID NO: 16071 - RNA, 159 nt, unidentified
  source 1..159: mol_type = other RNA; note = Related to JAFUAO010000003.1; note = Ruminococcus sp.
agacgccggcagcgttttgcacttgcatactgcggcgagtcgccgcagggctttcaggaatatccacatgagcaaatgtcagctccactgaataaataagtcaacttcgttgacttcaattcagctccgccgcatttgaatgttttgtgccggcagtct

SEQ ID NO: 16072 - RNA, 171 nt, unidentified
  source 1..171: mol_type = other RNA; note = Related to JAFZOZ010000090.1; note = Clostridia bacterium
cgggcgccggcagcgatactgcagcggcaggcacactgcatgaccgcggcgagtcgccgcgggagcgttcagatcacagcccatgatcaaaagtttctccaccgaataagaattaactgcgttaatcggaattcggctccgaaacatttgaataccttgtgcccgcgtccg

SEQ ID NO: 16073 - RNA, 159 nt, unidentified
  source 1..159: mol_type = other RNA; note = Related to NZ_HF545616.1; note = Ruminococcus sp.
caagcgtcagcagcgatattgcaaaacgcataactacagcgagtcgctgtggaagtttcagggaatagtagctttgtcaaaagctttttcaccgaatcggatttaattccattaaataaaattcggctccaaagcatttgaatcttgtgctgacgcttg

SEQ ID NO: 16074 - RNA, 237 nt, unidentified
  source 1..237: mol_type = other RNA; note = Related to SVTP01000007.1; note = Oscillospiraceae bacterium
ggcagaacaacagtgtatttcgattttcgaaagggatggcgagtcgtcatcttttcacctacggttagcgtattcgctgcacaagccctgcaaaagtctttccgacacgcgagcgtctcgggacttttgacgtcggtcttgttccgctcagtcgaaatgctcgacgaagtgatacaaggcgatgccttgtagtactacgtctgcgcgtttcgccatacaaattggtgttgttctgat

SEQ ID NO: 16075 - RNA, 249 nt, unidentified
  source 1..249: mol_type = other RNA; note = Related to SVQS01000086.1; note = Oscillospiraceae bacterium
aacagaacaacagtgtatttcgatttttttcgaaagggatggcgagtcgtcatcttttcactcatggctatcgtattcgctgcacaagccctacaaaagtcttccgacacgcgagcgtttcgggacttttgccaacggtcttgttccactcagtcgaaatgctcgacgtagtctagcaaggtttcgtaaaactcaccttgctatcggtacgtctgcgcgtttcgccatacaaattggtgttgttctaat

SEQ ID NO: 16076 - RNA, 234 nt, unidentified
  source 1..234: mol_type = other RNA; note = Related to SVRN01000036.1; note = Oscillospiraceae bacterium
aacagaacaacagtgtatttcggtattcgaaagggatggcgagtcgtcatcttttcactcacgctcagctcattcgctgcacaagccctacaaaagacttccttcggaagcttttgctgaacggacttgttccactcagtcgaaatgctcatcgtagcgccgcaaggttacgtaaactacaccttgctgatctacgtctgcgcgtttcgccatgcaaattagtgttgttctatg

SEQ ID NO: 16077 - RNA, 237 nt, unidentified
  source 1..237: mol_type = other RNA; note = Related to SVST01000008.1; note = Oscillospiraceae bacterium
aacagaacaacagtgtatttcggtttctacgaaagggatgacgagtcgtcatcttttcactcatattgatcgtattcgcggcacaagtcctacaaaagcttttctcgaaagcttttgcttaacggacttgttccgttcagcctaaccgcgccactgtagtcaccgcaaggctccgcacgcttcaccttgctaaactacacctctgcgattagccatacaaattcgtgttgttctgaa

SEQ ID NO: 16078 - RNA, 253 nt, unidentified
  source 1..253: mol_type = other RNA; note = Related to JAGALS010000020.1; note = Clostridia bacterium
caaggaacaacagtgtatttcatttttgaaagggatggcgagtcgccatcttttcactcacgtttgtctcattctctgcacaagcctacaaaaaagctttcttgcgatcgcaagcgattctcagaaactttttgtgcttaacggcttgctccgctcagcctaaatgctcaccgtagccgaggcaaggttgcgcaagcttcaccttgcaaaactacgcttgcgctttagccatgctgattcgtgttgttccaaa

SEQ ID NO: 16079 - RNA, 262 nt, unidentified
  source 1..262: mol_type = other RNA; note = Related to JAFTNT010000011.1; note = Clostridia bacterium
cttagaacaacagtgtatttcgttttttacgaagggggtgacgagtcgtcaccttttcacccaagcttaacgtattcgttatacaagcctacaaaaaagctttcttccgcaaatcgcaagcgatttcttcagaaactttttatgcttaacggcttgctccactcagcctaaatgctcgatgtattcgatgcaaggcgtcgcaggctttgccttgcttaaatacgtctgcgcgtttagccatgcaaattagtgttgttctaaa

SEQ ID NO: 16080 - RNA, 250 nt, unidentified
  source 1..250: mol_type = other RNA; note = Related to JAFVUY010000073.1; note = Bacilli bacterium
tatagaacaacagtgtatttctttttatagaagaaagggatggcgagtcgtcatcttatcacttatatttaccgtattcgctgcacaagtcctacaaaagctttttcttctattcggcaggctcattcagaaaaacttttgcttaacggtcttgttccgttcagtcgaaatgctcatcgtagtcccgcaaagctatgctttgcccccctacgtctgcgcgtttcgccatacaaattggtgttgttctata

SEQ ID NO: 16081 - RNA, 261 nt, unidentified
  source 1..261: mol_type = other RNA; note = Related to SVHW01000007.1; note = Clostridiales bacterium
aatagaacaacagtgtattttgacttttgtcaaaaaggatggcgagtcgtcatcttgtcacttatatgtatcgtattcgctgcgcgcaacctacaaaagaaatattgcgtccgagacatttcattgacgtcaatattcttttgtgtaacggttgtgctccgctcaactgcaatgctcgacgtagccacgcaaggcttcgcaggctacaccttgcctaactacgcctgctgcgtttcgtgtacaaattggtgttgttctaaa

SEQ ID NO: 16082 - RNA, 243 nt, unidentified
  source 1..243: mol_type = other RNA; note = Related to JAFXAN010000018.1; note = Clostridia bacterium
tgaagaacaacagtgtatttcgattctcgaaagggatggcgagtcgtcatcttgtcacttatatttagcgtattcgctgcacaagcctacaaaagcttttcctcggtgctcggttcgcattcgaaaaagcttttgcttaacggcttgctccgctcagctgaaagcctcgacataattctgcaaggcttcgccttgctattctatgtctgcgactttcatcatacaaattagtgttgttctgaa

SEQ ID NO: 16083 - RNA, 259 nt, unidentified
  source 1..259: mol_type = other RNA; note = Related to JAFTHO010000004.1; note = Clostridia bacterium
gacagaacaacagtgcatttcggtttttatcgaaagggatgacgagtcgtcatccttgcaattatctttaacatattcgttacacacaccctacgaaaaatcgtttgtatcgaaaaatccgttgtgattttgtctcacaaacgtttttcgtggccgggcgcgttccgctcagacgaaatggtcggcgtataggatgcaaagcggtgctttgctgcaatacgcctgcacattacgccatacaaacaagtgttgttctgtc

SEQ ID NO: 16084 - RNA, 180 nt, unidentified
  source 1..180: mol_type = other RNA; note = Related to JAFVYN010000052.1; note = Clostridia bacterium
aaatgaacaatagtgtttcgactctgtcgacggggcggcgattcgccgtcctttcacgcatatccttcgtattcgctgcgctcaaagaaatcgcttggcgtaatcgcttcgctttgtgcgactgacgtcgcacggaaatacgccgcacgatatcttatgcacaatttgtattgttcaagg

SEQ ID NO: 16085 - RNA, 183 nt, unidentified
  source 1..183: mol_type = other RNA; note = Related to JAFTKF010000062.1; note = Clostridia bacterium
aaatgaacaatagtgtatttcgattctgtcgaaacgggcggcgagtcgccgtctgacacccctacccttccgtattcgcaaggctcagatgaaatgcttggcgtaaacgctggcgctttgtgcgccttcggcgcacggatatacgcccgcgcatttcctcatacaaatctgtattgttcgaag

SEQ ID NO: 16086 - RNA, 191 nt, unidentified
  source 1..191: mol_type = other RNA; note = Related to JAFTRY010000008.1; note = Clostridia bacterium
aagaaaacaatagtgttattcgatttatcaatcgaaccgtgagcgagtcgctctcggtattcaaatattttcgtattcgcaagctcaaatgaaaagcttgaagtaaaccgcgcacagagtgcgctaaatgcgactgacgacgcatttcattactcctgcgcttttcatcatacaattagtattgtttaagg

SEQ ID NO: 16087 - RNA, 189 nt, unidentified
  source 1..189: mol_type = other RNA; note = Related to SVSM01000002.1; note = Oscillospiraceae bacterium
aaaaaaacaatagtgttattcgatttattatcgaaccgtgagcgagtcgttctcggcagttaatcttttcgtattcgcaggctcaaatgaaagagcttgaagtaattcgcgcacaagtgcgctatatgcgactttcgtcgcatatccttactcctgcgcctttcattatacaatttgtattgtttgagg

SEQ ID NO: 16088 - RNA, 203 nt, unidentified
  source 1..203: mol_type = other RNA; note = Related to JAFVSI010000037.1; note = Clostridia bacterium
aaatgaacaatagcgttattcggtttttaaatcgagccgtgagcgagtcgctctcggtagcaaaatttttcacgtattcgcagggctcaaatgaaaatcttgaagtaagaccgcaatactgtgcaagcacagtttgctaatgtgcgacaagtcgcaccgagttactcctgcgtttttcattatacaaatagtattgttcaagg

SEQ ID NO: 16089 - RNA, 188 nt, unidentified
  source 1..188: mol_type = other RNA; note = Related to SVRW01000015.1; note = Oscillospiraceae bacterium
atttgaacaatagcgttataggtttttacatgccgtgagcgagtcgctctcggaagaattaaactatcctcattcgttttactcagatgaaaacgtcgggagtaagcgcgcactgtgtgcgcttaagtgcggcaagccgcaccacattacacccgcccttttcaccatacaataagtattgttcaaaa

SEQ ID NO: 16090 - RNA, 191 nt, unidentified
  source 1..191: mol_type = other RNA; note = Related to JAFTKI010000072.1; note = Clostridia bacterium
cttcgaacaatagcgttattcgattttatcgagccgtgagcgagtcgctctcggtaacccgcaattccccgtattcgctgtcgctcagcgaaaagtcttggagtaagtcgcgcaaaaatttgcgctgagtgcggcatagccgcactactttacaccttcgcctttccgtatacaatcagtattgttcaaaa

SEQ ID NO: 16091 - RNA, 208 nt, unidentified
  source 1..208: mol_type = other RNA; note = Related to JAFVTO010000133.1; note = Clostridia bacterium
gcacgaacaatagcgttgggatgatatcctctcaggagcctgactccggatgactcatcctccgtcggcgagtcgcctacggaaaaagtataatacccgtattcgctacgctcagatgaaaatctcagcgtaaacgcttcgcttagttcgtcgttgccgaactgcattacgcttgcgattttcagcatgcacatagtattgttcaaga

SEQ ID NO: 16092 - RNA, 193 nt, unidentified
  source 1..193: mol_type = other RNA; note = Related to JAFTUH010000073.1; note = Clostridia bacterium
tcccgaacaatagtgtcacttgatttttcaagccggcagcgagtcgctgtcggaggcagtaaccctgccgtattcgctgcgctcagatgaaaatgctcggagtaaaaaccattcctgcggaatggtgacgtacgccttcgacgtacctcattacacctgcgcttttcagcatacaaatttgtattgttcaggg

SEQ ID NO: 16093 - RNA, 176 nt, unidentified
  source 1..176: mol_type = other RNA; note = Related to JAGBRZ010000213.1; note = Clostridia bacterium
tgcaaggcaatagtgttgttcgttttattacgacattgatagcgagtcgctatcgataacatcaaaccttatctcattcgcgcagctcaagcaaagttgctcaatgtagtttagaggcacacttcatgtgcggcactacatttcgccccattgctatacaaatgtattgccttgca

SEQ ID NO: 16094 - RNA, 174 nt, unidentified
  source 1..174: mol_type = other RNA; note = Related to JAFTOR010000034.1; note = Clostridia bacterium
cgcaaggcaatagtgttgttcgtttgattacggcgttgatagcgagtcgctatcgataacatttagccttataccattcgcgttgctcaagcaaaatgctcaatgtagctcgcggcacatttcatgtgctaaactacatttcgccttattgctatacaaatgtattgctttgcg

SEQ ID NO: 16095 - RNA, 172 nt, unidentified
  source 1..172: mol_type = other RNA; note = Related to JAGAMD010000012.1; note = Clostridia bacterium
catagggcaatagtgtattccatttaggagtcgatagcgagtcgctattgatacaattcaattttacatatttcgcaaatgctcaagcaaaaacactccatgtagtaaatccgcccaccatatgggctgtcctacatatcgcattcttgccatacaaatgtattgtcctatg

SEQ ID NO: 16096 - RNA, 185 nt, unidentified
  source 1..185: mol_type = other RNA; note = Related to JAFQLX010000091.1; note = Clostridia bacterium
taaagggcaatagcgatttttgtttataatacaaactcggcggcgagtcgccaaccgagccgcatttaccccgtatattgagacgaaagtgagcgcagtatcatagcacattttatgtgcacgtgcgcgttttgcgcacttaatacagcgcttcatttcgccatacagcattgtattgccctttt

SEQ ID NO: 16097 - RNA, 430 nt, unidentified
  source 1..430: mol_type = other RNA; note = Related to JAGBUH010000087.1; note = Clostridia bacterium
taaagaacaatagcgtgaatttggtattcttatcaaaaacggcggcgagtcgctgtcgtatagcataaaagagtcgaacccataatggtttgaaaagctattttcgcccataatttcgcaattctcgttaggaatacgcccgtattccgtcgctcaccttgctcattctggacaaaaatttcaatttcaaacgcacctacggcgaggtagtttcgagaagaaattttgtttttgagcgcagatatactaacgtatatcaagcgaaaaaacaggcattgtgtgttcgattcttttatgctatagcacaaaaccttcgtatatcgcgcgtcgcgcacgaaaaattgctcgaagtagaactgcacacgctgtgtgcgcgctttcgcttttctacatctgcgcattttccgtatacaaaatgtattgttctggt

SEQ ID NO: 16098 - RNA, 173 nt, unidentified
  source 1..173: mol_type = other RNA; note = Related to JAFSIE010000307.1; note = Clostridia bacterium
agcagagcatcagcgtttttcagcttttgcctgaatcgtcagcgagtcgctgccgatagcgtaacctcgtatactcgcacagctcgagagaaattgctggatgtgttaaagcacatgatatgtgcaaataaacacatctgcacaatttcctatacacatagtcttgctctgct

SEQ ID NO: 16099 - RNA, 192 nt, unidentified
  source 1..192: mol_type = other RNA; note = Related to JAFTLM010000135.1; note = Clostridia bacterium
aacagaacggtagcttgtttcggatatccgaagtcggcggcgagtcgcctccgacagtaaaaaactttttcgtattcgcgttgctcagccgagcgttcttcagcgtagccggtacacagagtgtacctcgagcacacgttgtgtgctacactacgcctacgcccgtcgtcatgcaaaaaagtaccgtcagaa

SEQ ID NO: 16100 - RNA, 193 nt, unidentified
  source 1..193: mol_type = other RNA; note = Related to JAFNUZ010000041.1; note = Clostridia bacterium
aagtgaacggtagcttatttcggatatccgaagtcggcggcgagtcgccgtcgataattttcaagcttttcgtattcgctttgctcagccgagcgttcttcggcgtagccggtacacgctgtgtaccttcagcacaccttgtgtgcgttcctacgcctacgcccgtcgtcatgcaaaaaagtaccgttgaaag

SEQ ID NO: 16101 - RNA, 165 nt, unidentified
  source 1..165: mol_type = other RNA; note = Related to JAGBSO010000048.1; note = Clostridia bacterium
tcaggagcaatagattttatcttttttcaagatagcgtcagcgagtcgctgaacgtaattttcaatcgtataacgcgggcgaaatgctcgctataatccaacacactgacatgtgtcaaaagttatagcttcgcatttcggcatacggatattgtattgctctga

SEQ ID NO: 16102 - RNA, 227 nt, unidentified
  source 1..227: mol_type = other RNA; note = Related to JAFQKX010000056.1; note = Clostridia bacterium
ataggaacaatagcttttgtcaaaattatggcaccggcagcgagtcgccgtcgggtagcatgaagtattcgtattcgcttgcgctcagtcgaattgctcgcagtatttcagcacacgttgtgtgcgccaccgcgacgtgagtaaaatatgcctgcgtcatattctactcacgtccgcacccaaaatactgctgcgcacttcgccgtacatcattgtattgttccgta

SEQ ID NO: 16103 - RNA, 201 nt, unidentified
  source 1..201: mol_type = other RNA; note = Related to JAGAUY010000021.1; note = Oscillospiraceae bacterium
tcaggaacaatagcttttgtcaggccactggcaccggcagcgagtcgctaccgggtagcgcatatttcacgtattcgcttcgctcagacgaactgcttgcagtattccagcacacgttgtgtgcccaccgcggcacatttcatgtgcccgcaccccggatactgctgcgcacttcgccgtacatcattgtattgttccact

SEQ ID NO: 16104 - RNA, 202 nt, unidentified
  source 1..202: mol_type = other RNA; note = Related to JAFQIL010000045.1; note = Oscillospiraceae bacterium
ttaggaacaatagcttttgtcagaatactggcaccggcagcgagtcgcttccgggtagcatccatccaccgtattcgcttcgctcagccgaactgcttgcagtatttcagcacacgttgtgtgcgccaccgcggcacatttcatgtgcccgcaccctaaatactgcagcgcatttcgccatacatcattgtattgttccaat

SEQ ID NO: 16105 - RNA, 201 nt, unidentified
  source 1..201: mol_type = other RNA; note = Related to JAFQNL010000019.1; note = Oscillospiraceae bacterium
tgtggaacaatagcttttgtcagatcactggcaccggcagcgagtcgctgtcggatagcgcaaattcaacgtattcgcttcgctcagccgaactgcttgcagtattcctgcacacgctgtgtgcccaccgcggcacatttcatgtgcccgcaccccggatactgctgcgcacttcgccatacatcattgtattgttccaga

SEQ ID NO: 16106 - RNA, 202 nt, unidentified
  source 1..202: mol_type = other RNA; note = Related to JAFVXA010000039.1; note = Oscillospiraceae bacterium
gtgggaacaatagcttttgtcagatcattggcaccggcagcgagtcgctgtcggcaggcacatggtatcgtattcgctttgctcagtggaactgcttgcagtatttcagcacactccgtgtgcgccaccgcggcacatttcatgtgcccgcaccccaaaatactgctgcgcatttcgccatacatcattgtattgttccgat

SEQ ID NO: 16107 - RNA, 174 nt, unidentified
  source 1..174: mol_type = other RNA; note = Related to JAFTVM010000054.1; note = Oscillospiraceae bacterium
catggaacaatagcttttgtcagacctctggcaccggcagcgagtcgctgccgggaagcacctggccatcgtattcgcttgcgctcagacgaactgcttgcggtattaccgcacacgctgtgtgctggagaatacccctgcacacttcgccatacatcattgtattgttccgga

SEQ ID NO: 16108 - RNA, 175 nt, unidentified
  source 1..175: mol_type = other RNA; note = Related to DVGO01000036.1; note = Candidatus Faecousia faecavium
tcaggaacaatagcgtttgtcaacacccgttggcatcggcagcgagtcgctgccggttcgcagaaacctgcctcattcgcaatgctcagcccaagtgcttgcggtatttccgcacaccctgtgtgctttcagataccgccgcacactttggcatacatcatggtattgttcctta

SEQ ID NO: 16109 - RNA, 177 nt, unidentified
  source 1..177: mol_type = other RNA; note = Related to WNBA01000006.1; note = Pseudoflavonifractor sp.
cacggaacaaaagtgtccgtccggcagacccggcaccggcggcgagtcgccgccgggcggcagataccctatcgtattcgcttcgctcagccgaagcagcacagcggtattcctgcacactgcatgtgcatcaaaataccgctgagccgttcgccatacatcttgttttgttccgta

SEQ ID NO: 16110 - RNA, 178 nt, unidentified
  source 1..178: mol_type = other RNA; note = Related to KE159708.1; note = Oscillibacter sp.
cacggaacaaaaggaaccgtccaatttcgattggcgccggcggcgtgtcgccgtccggttttcgcacacccaccgtattcgctccgctcagccgcgccgctccgaggtagaaccgcacggctgcaccgtgctcttgctaccgctccgcggcccgacatgcagatggttttgttccgaa

SEQ ID NO: 16111 - RNA, 171 nt, unidentified
  source 1..171: mol_type = other RNA; note = Related to DXIA01000170.1; note = Candidatus Pygmaiobacter gallistercoris
acagcaggcggcagaaaaagcctttttggccccgacagcgagtcgctgtcggtttgttttatcacacacaggtttcgctgacactcagccggtccgctggccgtattaccgcaaacggtgtttgctcaagatacggctgcacggccctgctacgttttgtaccgccgctgt

SEQ ID NO: 16112 - RNA, 170 nt, unidentified
  source 1..170: mol_type = other RNA; note = Related to JACONZ010000001.1; note = Anaerofilum sp.
catgaacccggcagcaaaaagccgatccggcgccggcagcgagtcgctgccggaacatcgttcttcacaggattcactccgttcaggcggaaccgcttgccgtattcccgcaaacgctgtttgctgaaaatacggctgcgcggcccctctacgctttgtaccggctcatg

SEQ ID NO: 16113 - RNA, 180 nt, unidentified
  source 1..180: mol_type = other RNA; note = Related to CP048436.1; note = Flavonifractor plautii
cacggaacaaaagagaagcccggctcagacgccggagccggccgcgaatcgcggccggtcccgcagactcacgcgtattcgcttcgctccgccgaagcgccgcagcggtatttcagcacacctgcggtgtgcagggggataccgccgcgccgttcgccatacagcaggttttgttccgaa

SEQ ID NO: 16114 - RNA, 190 nt, unidentified
  source 1..190: mol_type = other RNA; note = Related to JAGZAL010000035.1; note = Butyricicoccus pullicaecorum
cataggacaaaagcgtttccgccttttggcgccggcggcgagtcgcccccggttttcgcacacccatccgtattcgctgcgctcagccgcactgctccgcggtattcccgcacattccatgtgcacggcacgccgccggcgtgctgacataccgctccgcagcacgccatacacatggttttgtccccgt

SEQ ID NO: 16115 - RNA, 197 nt, unidentified
  source 1..197: mol_type = other RNA; note = Related to BQNX01000001.1; note = Eubacteriales bacterium
tgcggaacatcagcccttggccaaatcgtttggcgccggcggcgattcgccgccggttcgagaaacctctgcgtattcgctgcgctccagcggcggtgctcgcagtatttctgcacactgcgtgtgctcagggcgcgctgggcgcgcccttcccatactgctgcgcccgcgcaatgcacattttgttttgttccgca

SEQ ID NO: 16116 - RNA, 179 nt, unidentified
  source 1..179: mol_type = other RNA; note = Related to QALD01000098.1; note = Oscillospiraceae bacterium
cgcggaacatcagtctttgtcccgacgttcgggcgccggcggcgagtcgccgccggttgtttgccgcctggttcgaatcgcgtgcgctcacccgccgccgcttgccgtattccaaggcacacgatgtgtgctcctatacggctgcgcggggcgcgatgcgtcatctgtgctgttccgcg

SEQ ID NO: 16117 - RNA, 206 nt, unidentified
  source 1..206: mol_type = other RNA; note = Related to JAFURT010000015.1; note = Clostridia bacterium
gaccggacagtagcgttgattcataattttatgaaagcggtagcgagtcgttaccgttgacctacccagcgtatatgcgtgcaagcacgagaaggcggcttgatgtgaagctgcccacggggggtgggcacacgcatccgacctttggtcggattgcgttttattcacatcggcaccgccgtctatacacacagttctgtccggtc

SEQ ID NO: 16118 - RNA, 175 nt, unidentified
  source 1..175: mol_type = other RNA; note = Related to JAFBIO010000002.1; note = Fournierella massiliensis
aacagagcaatagttttgtcccgacccgggcaccggccgcgagtcgcggccgggatatggatccctggcatattcgctgcgctcaggcgagaccgcttgcggtattccggcacaccctcggtgtgcttaaaaataccgctgcgcggctccccatgcatattggtattgctctttt

SEQ ID NO: 16119 - RNA, 176 nt, unidentified
  source 1..176: mol_type = other RNA; note = Related to NZ_CP044227.1; note = Flintibacter sp.
tggaaagcgatagtttttgtccgtctttggacctcgtccgcgtgtcgcggccgggtttatggattccatcgtattcgctgcgctcaggagaaagcgctggcggtattaccgcacatcgccgatgtgcttcatgataccgctgcacgcttccccatacacatttgtatcgctggaca

SEQ ID NO: 16120 - RNA, 175 nt, unidentified
  source 1..175: mol_type = other RNA; note = Related to JACJJD010000020.1; note = Pseudoflavonifractor sp.
ttcagggcagcaggctctgacctcaattggtccccggccgcgagtcgccgccgggctgcaaaagcttgtcgtattcgctgcgctccggcgaaccatccagcggtataaccgcacaccaaggtgtgctggaagataccgccggacggttccccatacacattggtgctgtccggcc

SEQ ID NO: 16121 - RNA, 175 nt, unidentified
  source 1..175: mol_type = other RNA; note = Related to NZ_CP034413.3; note = Dysosmobacter welbionis
acaggggtgatagctgcagcccctttcgggcgccggccgcgagtcgcggccggttggctggattctggcgtatgcgcttcgcgcaggcgagcccgcttgcggtattggagcacacctgcgatgtgctggaagataccgccgcgcggttccccatacaaatttgtatcgctccgta

SEQ ID NO: 16122 - RNA, 175 nt, unidentified
  source 1..175: mol_type = other RNA; note = Related to NZ_LR130816.1; note = Intestinimonas sp.
tgcggagcggcagtccccgtcccttaccgggcgccggccgcgcgtcgcggccggtcggcagcatccccgcgtattcgctgtgctcaggcgagccgccttgcggtatttccgcacaccggggtgtgcagacagataccgccgcggcgttcgccatacacatttgtaccgcttcgca

SEQ ID NO: 16123 - RNA, 176 nt, unidentified
  source 1..176: mol_type = other RNA; note = Related to NZ_JADCKB010000012.1; note = Ructibacterium gallinarum
gctgaagccgtagtcaagtcatcatgacaccgggcgcgagtcgcgcccggttttttctttattatcgcagattcgctgcgctcaagaaagcggaaaaaccgcattcccgcaaactgcgtttgcaacaaaaaaatgcgccctttcctctttctatgcacattttgtacggcttcagc

SEQ ID NO: 16124 - RNA, 173 nt, unidentified
  source 1..173: mol_type = other RNA; note = Related to JAGBHD010000062.1; note = Oscillospiraceae bacterium
agttaagcattagcgttaattcaacgttgttgaatcgatagcgagtcgttatcgtctaactaaactattatgcattcgcatactcaagaaaattgcttgatgtgtttcagcatatttcatatgcaacaaaaacacatctgcgcaatttcctatactcatagttttgtttaact

SEQ ID NO: 16125 - RNA, 172 nt, unidentified
  source 1..172: mol_type = other RNA; note = Related to JAFXAP010000004.1; note = Clostridia bacterium
agttaaacattagtgttaattcaaccttgttgaaacgatagcgagtcgttatcgcataactaaactattacatattcgtatactcaagtaaattgcttgatgtgtttaagcatatttcatatgcatcgcaacacatcttcacaatttcctatacacaaagttttgtttaact

SEQ ID NO: 16126 - RNA, 171 nt, unidentified
  source 1..171: mol_type = other RNA; note = Related to DVKV01000137.1; note = Candidatus Faecousia intestinavium
gcaggaacaatagccctgcccattttggcaccggcggcgagtcgccgccgggcggcggattttcgcctcattccctgcgttcagacgaagtcctcgcggtattcccgcacacgttccgtgtgctccaagataccgctgcgtcttcgccataccaaatggtattgttcccat

SEQ ID NO: 16127 - RNA, 184 nt, unidentified
  source 1..184: mol_type = other RNA; note = Related to JAFQDF010000039.1; note = Clostridia bacterium
aaatgaacagtagcgttatgtcataattacacctattcaagggtcttatgacaggtaacagcgagtcgctgttgcagatcattaattacaggcaaagatcaatgttgctcgctgtatatttttccaaacagggtttggcgtcatacagcttcacaaattgatatacagattgtactgttcatta

SEQ ID NO: 16128 - RNA, 179 nt, unidentified
  source 1..179: mol_type = other RNA; note = Related to JAFUMW010000045.1; note = Clostridia bacterium
agcaaaacaatagcgttagtcaatttcggcgtttgcggcgagtcgccgcagatatcgcaaacagtcacgtattcgcttcgctcaggcgaaaacgcttgcagtagaacgctgcgcttctatgcactgcgtgcataaaactacagcctcgcgtttcaccatacacattgtattgttttgca

SEQ ID NO: 16129 - RNA, 186 nt, unidentified
  source 1..186: mol_type = other RNA; note = Related to JAFPLT010000171.1; note = Lachnospiraceae bacterium
ccatagacaccagaaacaccgaagctttttttatgctttggaccggttccgagtcggaaccgggaacaggaaaatgagaagcggaacgcaggcgcgttcatcaaaagctccgctgtagattttggcacattccatgtgcaacactacagctccgccttttgatatgcacaaaagtggtgtcttaaa

SEQ ID NO: 16130 - RNA, 177 nt, unidentified
  source 1..177: mol_type = other RNA; note = Related to JAFZQQ010000087.1; note = Oscillospiraceae bacterium
tgtggaacattagcgcgcgtcaacatccgttggcaccgtcagcgagtcgctgccgggatgcagaaccactaggcattcactgcgtgaaatcgcagctactccactgtattacagcccacttcatgggcttaggaatacagctgcgtagctacaatgttctcaatgttttgttccaca

SEQ ID NO: 16131 - RNA, 176 nt, unidentified
  source 1..176: mol_type = other RNA; note = Related to SVKP01000140.1; note = Oscillospiraceae bacterium
cgtgaagcgttagtgtgggtcaacattcgttggcaccggcggcgagtcgccgccgggaggcgggactacagagtattcactgcgtgaaatcgcagccgctcactgtattagcgcccacttcatgggcttgagaatacagcgagacagctgccatattctcactgtattgctccacg

SEQ ID NO: 16132 - RNA, 179 nt, unidentified
  source 1..179: mol_type = other RNA; note = Related to JAFWAC010000028.1; note = Clostridia bacterium
agcggaacattagcgcaagtcaatatctacattggcaccgacagcgagtcgttgttgggatgcatgcttcaaaagcattcacttcgttcattcgaagttgactacactgtatttaagcccactttatgggctaaggatacagcttcgcaacttcgatattctcattgttttgttccgca

SEQ ID NO: 16133 - RNA, 180 nt, unidentified
  source 1..180: mol_type = other RNA; note = Related to JAFQMR010000111.1; note = Clostridia bacterium
tgcgaagcatcagagcaagtcgatccccatcggcaccgaccgcgagtcgcagtcgggatgcaccgcctttaaaccgattcacttcgttcattcgaagacggctccgctgtatggaaacccattgcatgggttcaaaaatacagctttgccgcatcgaaattcacattgtcttgtttcgca

SEQ ID NO: 16134 - RNA, 176 nt, unidentified
  source 1..176: mol_type = other RNA; note = Related to NZ_JACOPN010000001.1; note = Flintibacter sp.
tgtggaacattagcgcaagccagattttattggcaccggcagcgagtcgctgctgggaagcacagcttagtttgattcacttcgttcagcctaatctgctccgctgtataaaaggcacacgccgtgtgcttaaaatacagctgcgcagcttagcattcacattgttttgttccaca

SEQ ID NO: 16135 - RNA, 179 nt, unidentified
  source 1..179: mol_type = other RNA; note = Related to SVSR01000007.1; note = Oscillospiraceae bacterium
agtggaacataagagcaagtcaataaacattggcaccgacagcgagtcgctttcgggaagcagcatttacaagtattcactacgttcagacgaagttgactccgctgtatctaaaaggcccactgcgtgggctataatacagctacacaacatcgtaattcacattgttttgttccacg

SEQ ID NO: 16136 - RNA, 181 nt, unidentified
  source 1..181: mol_type = other RNA; note = Related to JAGBHE010000095.1; note = Clostridia bacterium
tgcagagcattagagcaagccttaatttaacggcgccgatagcgagtcgttatcggaaagcaaatatcaataaatattcactatgttcaaacgaagttgattacgctgtattcgggaagcccactgcatgggcctaaatacagcttcacaacatcgtaatacacatttgtattgctttgca

SEQ ID NO: 16137 - RNA, 178 nt, unidentified
  source 1..178: mol_type = other RNA; note = Related to JAFSXU010000033.1; note = Clostridia bacterium
tgcggaacaatagcgcaggtcaatgttcattggcgtcggcaacgagtcgttgtcggggagtagagtttacaagtattcacttcgttcagacgaagttgactccgctgtataaagatgcccacttcatgggctaaaatacagctacacaacatcgtaattcacaatgtattgtttcgca

SEQ ID NO: 16138 - RNA, 183 nt, unidentified
  source 1..183: mol_type = other RNA; note = Related to JAFYQP010000074.1; note = Clostridia bacterium
aacgggacattagcgcaagtcaatttttaccattggcaccgacggcgagtcgctttcgggatgcagtattcaatgagattcagtaccttcagccgaagcgtgctacattgtataaaaaagcccacgccaggtgggctatgatacaactccgcagcttcgtgatgtacattgttctgttccgta

SEQ ID NO: 16139 - RNA, 176 nt, unidentified
  source 1..176: mol_type = other RNA; note = Related to JAFPRS010000057.1; note = Clostridia bacterium
ttgcggaacatagcgcatgcgttgctttcagcgcgccgtcggcgagtcgccgccggaagccaatatgatcagacgaccgcttcgctcgaacggagcggctccgctgaattgccgcccacttcatgggctataatattcagcttcgcagcccgttctgctcaatgtatgttccgaaa

SEQ ID NO: 16140 - RNA, 178 nt, unidentified
  source 1..178: mol_type = other RNA; note = Related to JAFQUH010000074.1; note = Ruminiclostridium sp.
tgcggaacatcagagcaggtcggtttacatcgacaccggcggcgagtcgccgtcgggaagcagcatttccacctattcacttcgttcacccgaagctgactccgctgtatttatgcccacggtgtgggcaagaaatatacagcttcgcatctgcggattcacattgtcttgttccgcc

SEQ ID NO: 16141 - RNA, 175 nt, unidentified
  source 1..175: mol_type = other RNA; note = Related to JAFQPT010000004.1; note = Oscillospiraceae bacterium
gaacattagagcaagtcaatttccattggcacctgcagcgagtcgctgtggggatgcattaccatgatcgatgcacgcaagtgcaatcgaagctgctgcgctgtatttcagcccactgtcatgggctcgggtatacagcttcgcatcttcggtattcacattgtattgttctgca

SEQ ID NO: 16142 - RNA, 178 nt, unidentified
  source 1..178: mol_type = other RNA; note = Related to JAFUPP010000033.1; note = Clostridia bacterium
cacggaacataagcgcaggtcaattatcattggcaccgacagcgagtcgcggtcgggacagcaatatcagtatagtttcgctttgctcaagcgaatctgtttaagcagtatttaagcccacatacatgggctcagtatacagctacacatcttcgtattcacattgttttgttccgta

SEQ ID NO: 16143 - RNA, 179 nt, unidentified
  source 1..179: mol_type = other RNA; note = Related to JAFPOZ010000331.1; note = Clostridia bacterium
tgtgaggcattagtgaacgtcaatttcttgacagctgcggcgagtcgctgcggtcagacatatacctttgatagtcgcttcgctccggagaagctgactgcgcagtatacgggcccatgttccatgggctggaggatactgcttcgcatcttctcgatgcgcattagtattgcctcaca

SEQ ID NO: 16144 - RNA, 180 nt, unidentified
  source 1..180: mol_type = other RNA; note = Related to JAFZOL010000002.1; note = Clostridia bacterium
ggcggaacgtaagcgcagacccgtttttttacggcgccggccgcgagtcgcggtcggtacgcggcatccccgcaggattcgcttcgctcaatcgcgttcgcttcgctgtattgcagcccgcttcacgggctcagagatacagctcgcaacggcgatatgctttttcagttacgttccgcg

SEQ ID NO: 16145 - RNA, 181 nt, unidentified
  source 1..181: mol_type = other RNA; note = Related to JAFURU010000174.1; note = Clostridia bacterium
aacggaacataagagcaagtcaatatacgttggcaccgtgggcgggtcgccctcgggaagcaggcaaaagatacggggctcacttcgttcggacgaaagcggctaagcagtatgaaaatgcccaccttgtgggcccgaatactgcaccgcgcttccgtgattcacattgttttgttccgta

SEQ ID NO: 16146 - RNA, 176 nt, unidentified
  source 1..176: mol_type = other RNA; note = Related to JAFTEJ010000045.1; note = Clostridia bacterium
tgtggaacactagagcaagtcaatcatcattggcaccggcagcgagtcgctgtcgggaagcatttcaacgaggggctcgcttcgctcgatcgaagctgcttcactgtgttttggggcccacgttgtgggcttaaacacagctcacatcttcgagatacacactgttctgttccaca

SEQ ID NO: 16147 - RNA, 177 nt, unidentified
  source 1..177: mol_type = other RNA; note = Related to JAFQEI010000172.1; note = Clostridia bacterium
tacggaacattagcgcgagccggttttcacaggcaccgacagcgagtcgccgtcgggatgcagtatccatcaggattcacttcgttcaaccgaagctgattccgctgtatttcagcccacttcatgggcttgggatacagctgcacatcttcgtgatccacattgttttgttccgtg

SEQ ID NO: 16148 - RNA, 167 nt, unidentified
  source 1..167: mol_type = other RNA; note = Related to JAGAYD010000015.1; note = Butyrivibrio sp.
tgcggaactctagcgcagctggcaaacgtcggcacgagtggcgagtcgttactcggaaaagaactatgtagcattataattgtagctgttccactgtagtgaaatgcacgcttcacgtgctagactacagctccacagcaacaatattcttactgttttgttccgca

SEQ ID NO: 16149 - RNA, 167 nt, unidentified
  source 1..167: mol_type = other RNA; note = Related to FOXO01000040.1; note = Butyrivibrio proteoclasticus
agcggaactctagcgtagtcaacaaacgttggcacgagtagcgagtcgttactcggaaaagatatttgtaacattataatagcagctgttccactgtagtaggaggcacgcttcacgtgctaaactacagctccacagcagcgatattcttactgttttgttccgct

SEQ ID NO: 16150 - RNA, 168 nt, unidentified
  source 1..168: mol_type = other RNA; note = Related to JAGBKD010000016.1; note = Eubacterium sp.
agcggaactctagtgtagtcggcatacgtcggcacgaatgacgagtcgttattcggaaagagtgattagtaccattttaattgcagctgtttcactgtagcaggaggcacgcttcacgtgcttaactacagctccgcagcagcgatattcttactgttttgttccgct

SEQ ID NO: 16151 - RNA, 169 nt, unidentified
  source 1..169: mol_type = other RNA; note = Related to JAFOYD010000138.1; note = Lachnospiraceae bacterium
aacggaactttagtgcagtcagctgacgttgacacggacagcgagtcgttgcccggaagtaaatcctgattacattattatcgccactgctccaacgtagttttgggcacgctgccacgtgcttctctacgcctgcgcagtagcaatattctaactgtattgttccgga

SEQ ID NO: 16152 - RNA, 180 nt, unidentified
  source 1..180: mol_type = other RNA; note = Related to FOWB01000004.1; note = Pseudobutyrivibrio sp.
tgtagaactatagtgcagtcaacttacgttggcacgagcagcgagtcgttgttcggatgtatatcatagtttgttttaatagatactgctccaacgtagtggaggcacgccgaagtgtaccacttcaacgtgctgctctacgcctacgcagcatcgatattcttactgtatggttctacg

SEQ ID NO: 16153 - RNA, 178 nt, unidentified
  source 1..178: mol_type = other RNA; note = Related to JAFQLL010000109.1; note = Clostridia bacterium
aacggagcattagtgtatgtcaattttaattggcaccgacagcgagtcgttgtcgggacaagttaagtaaaagtattcgcgcactcagctgaaacagctgtgactgtataaaaatgcccacttcatgggctcatatacagccacatcagcttcatgattcgcattgttttgctccgta

SEQ ID NO: 16154 - RNA, 172 nt, unidentified
  source 1..172: mol_type = other RNA; note = Related to JAFUOO010000022.1; note = Clostridia bacterium
aacggagcattagtgtaagcctattggcaccgacagcgagtcgttgtcgggacaaggttagtaaaagtattcacgagttcagctgaaacagctgtggcagtataaaaaggcccacttcatgggctcatatacagccacatcagcttcatgattcgcattgttttgctccgta

SEQ ID NO: 16155 - RNA, 177 nt, unidentified
  source 1..177: mol_type = other RNA; note = Related to JAFXHP010000039.1; note = Clostridia bacterium
agcagagcattagtgtatgtcaaaccttgtttgacgcctcgggcgagtcgccccgggttacataaaaataaaaaaagtcacttcgttccatccatgtggtgccgctgtaatattgcccacttcatgggccgaaagttacagcttaccacaaaagattttctcatgttttgctctgcg

SEQ ID NO: 16156 - RNA, 203 nt, unidentified
  source 1..203: mol_type = other RNA; note = Related to JAFYHQ010000006.1; note = Erysipelotrichaceae bacterium
agcagaacatcagtcataatcgatgcaggcattacctgccgataccgtcagcgagtcgctgccgggaaatgaaaaccaagctcaattgcttcgcaaatgagttgtctcggaagcaggtcactacactgcgttcgttcacgaactcactccatgtagattcctactgcatcctcgaaactcatattctcaagtcttgttctgct

SEQ ID NO: 16157 - RNA, 212 nt, unidentified
  source 1..212: mol_type = other RNA; note = Related to JAFRKA010000015.1; note = Erysipelotrichaceae bacterium
agcagaacatcagtcatgttcgatgaggagaccacaagtcaatcaagtcgataccgtcagcgagtcgttgccgggatatgaaaacttaattaatttgcttcgcaaatgaattgtctcggaagcattaaactacactccgttcgttctcgaactcactccatgtagacgcttcatgctccctcgaaattcatatactcaagtcttgttctgct

SEQ ID NO: 16158 - RNA, 203 nt, unidentified
  source 1..203: mol_type = other RNA; note = Related to JAFYHQ010000014.1; note = Erysipelotrichaceae bacterium
agcagaacatcagccatgatcggcgtaggtttgatcccgccgtaccgtcagcgattcgttgccgggaaatgaacacacagtattcttgcttcgcaaatgggttgtctcggatgtaggtttgtacactccgttcgttcacgaactcactccatgtacctcactactacaccctcgaaacccctattctcaagtcttgttctgct

SEQ ID NO: 16159 - RNA, 211 nt, unidentified
  source 1..211: mol_type = other RNA; note = Related to JAFRQF010000031.1; note = Erysipelotrichaceae bacterium
agcagaacatcagtcatattcgatgagaagaattatttcaatccttgtcgataccgtcagcgagtcgttgccgggatatgagcatcaatcatcattgcttcgcaaagaagttgtctcggaagcaggtaactacactgcgttcgttcacgaactcactccatgtagcccctgctgcatcctcgaaacttctattctcaagtcttgttctgct

SEQ ID NO: 16160 - RNA, 174 nt, unidentified
  source 1..174: mol_type = other RNA; note = Related to JAFUCV010000276.1; note = Solobacterium sp.
tgcagaacagcagcgcagttcatcttcacgatgacaccgtatgcgcgtcgcatacgggatgcacataaccgatacagtcacatgttccattccggtactgcactgcagtgagagcacacttcatgtgccatcctgcaattccgtatccgaaatattctcaggtgctgttctgct

SEQ ID NO: 16161 - RNA, 189 nt, unidentified
  source 1..189: mol_type = other RNA; note = Related to DS264270.1; note = Eubacterium ventriosum
tgcagtgcattagtgcatttcaattttatattgaagtcaatagggagtcgctattgatagttattaatacagtttgtattcgataaaatcgaatacaccatagaatctttgctcgatgtaggtggagcacattacatgtgctagactacatctgcgccagtttctaaattctcaatgttttgcattgca

SEQ ID NO: 16162 - RNA, 176 nt, unidentified
  source 1..176: mol_type = other RNA; note = Related to JAFTAK010000098.1; note = Clostridia bacterium
gccgaacatcagagcaagccaactaacgtcggcacccgcggcgagtcgccgcggggaagcatcaaccctgatccgcgcctgcggcgcgctcacagccgctccgctgtatgaattgcccactaccatgggctgtaatacagctccgcgcctgagaattcacactgtcttgcttcggc

SEQ ID NO: 16163 - RNA, 189 nt, unidentified
  source 1..189: mol_type = other RNA; note = Related to SVBR01000043.1; note = Erysipelotrichaceae bacterium
cggattgcaccagtgtgatccggttttggccggtaccgtcagcgagtcgctgccgggatacagtttggccagggttcgccttcggctcaattcctgatgctcgcagcagaacagcacacgtcccgtgtgcacgcccttacgggctgccctgcagctgcgcttcagaatattctcaagtggtgtcagaag

SEQ ID NO: 16164 - RNA, 193 nt, unidentified
  source 1..193: mol_type = other RNA; note = Related to JAFUHN010000140.1; note = Solobacterium sp.
gaaaacgcaccagcgttactccggcaatgccggtaccgtcagcgagccgctgccgggatgacagtccgctgaagcttcgccttcagctcaattcctgatgctcgccgcagtacagcacacgtcccgtgtgcacgccccgtaaaggggctgaactgctgctgcgcttcagaatattctcaagtggtgcagtaaa

SEQ ID NO: 16165 - RNA, 175 nt, unidentified
  source 1..175: mol_type = other RNA; note = Related to DPVX01000340.1; note = Erysipelotrichaceae bacterium
aaaacagcaccagcgtaacgtcattgcaaaatgacaccgtcagcgagtcgctgccgggatacgaaaacataaaatatgcgcatggcgcagttcctgtgctcgcagcagtacagcccatttcatgggtcccggaactgcagctgcgcgcagaaacattcgcaagtggtgctttgga

SEQ ID NO: 16166 - RNA, 189 nt, unidentified
  source 1..189: mol_type = other RNA; note = Related to JAGCGE010000004.1; note = Clostridiales bacterium
agcagagcaatagagcaagtcagctaattactgacgccggccgcgagtcgcagtcggagaagaaccaccgaggagtaagtaacgtgaacgttacttacaggtatcgaatcttcttcaatgaataagaattaacttcgttaatgtaaattcacttcagaatcttcgatattgatattgtattgttctgcg

SEQ ID NO: 16167 - RNA, 138 nt, unidentified
  source 1..138: mol_type = other RNA; note = Related to JAFWKC010000096.1; note = Eubacterium sp.
cagtcggcggcagaagattgaaatgacgtgttttcgtttcaggcgagtgcgagtcgtgctcgttaaataaaagtccaacaaagcgatgaacattagcattgcttcgcaatgcaaactatactcaggtgccgccggctg

SEQ ID NO: 16168 - RNA, 138 nt, unidentified
  source 1..138: mol_type = other RNA; note = Related to DOBY01000149.1; note = Oscillospiraceae bacterium
aggtcggcggcagcagatttaagtaatctttttacttaaggcaggagcgagtcgctgctgttaaacaaatttatttcgtgtgccgaatgcctcgtgcaatttcattgcacaacaaataacactaagtgccgccgaccg

SEQ ID NO: 16169 - RNA, 126 nt, unidentified
  source 1..126: mol_type = other RNA; note = Related to SVKT01000009.1; note = Oscillospiraceae bacterium
agacgaagcgtagcctttgcttgattacgatccgctcgagcaggtgtggcgagtcgccacgctacgacagtatttgtgaacgatgcgcgaatcccttcgcgctaccttcggcagtacgcttcgtct

SEQ ID NO: 16170 - RNA, 126 nt, unidentified
  source 1..126: mol_type = other RNA; note = Related to JAFXTM010000067.1; note = Oscillospiraceae bacterium
gcggtgaagatagcgtaattcctgccatcgcgcggggagagcagcgagtcgctgttctgttttttaagcccgacacccgaatctgcttcgcaattcggcactgaagaataaaggtgtcttcaccgc

SEQ ID NO: 16171 - RNA, 150 nt, unidentified
  source 1..150: mol_type = other RNA; note = Related to JAFTYM010000022.1; note = Oscillospiraceae bacterium
cagggagcggcagccgcgctttcttccgtaaaaagatgagggcaaggtgggcgagtcgccctccgtgagcttaattcagtgaggtccgcaaacgtacccgtttgcgctctcaagcttcgcttgagacattaatttttgtgccgcttcctg

SEQ ID NO: 16172 - RNA, 151 nt, unidentified
  source 1..151: mol_type = other RNA; note = Related to JAFQMH010000077.1; note = Oscillospiraceae bacterium
cagggagcggcagccgcgctttcttcccaaaaagctgaaagtaaggtgggcgagtcgccctccgagagattttttgagtgaggtccgcaaacgtttaccgtttgcgctctcaagctacgcttgagacaacagatttttgtgccgcttcctg

SEQ ID NO: 16173 - RNA, 174 nt, unidentified
  source 1..174: mol_type = other RNA; note = Related to NZ_LT835157.1; note = Proposed Anaeromassilibacillus sp.
gacggaacaacagcgctaaccatgtgatgcatacatggctggacggcgagtcgccctccagaaagatgactttggaaaaagaggcatgcggccttcgccgtgtcaagatacacaaggtgtattcccacacggctatgcccgcatcccttcaggaacaatttgtgttgttccgtc

SEQ ID NO: 16174 - RNA, 177 nt, unidentified
  source 1..177: mol_type = other RNA; note = Related to NZ_JADNJD010000005.1; note = Proposed Anaeromassilibacillus sp.
ggcgggacaacagcgctttccgtggccattgtcagcacggctggccggggagtcgccggccaataggatatctgggcagaaagaggcatgcgggattcgccgtgtaatcgatacactgcgtgtattcccacacggctgtgcccgcatcccttcaggtgtttgatgtgttgccccgcc

SEQ ID NO: 16175 - RNA, 176 nt, unidentified
  source 1..176: mol_type = other RNA; note = Related to NZ_LN868536.1; note = Proposed Anaeromassilibacillus senegalensis
gacggggcaatagcgtcttccgcctcccgcgcggcagcccggcgagtcgccgggccggacagtcattcccgattccgggagaaaaacaagcctcgccgtgttccggatacactgcgtgtatcaatagacacggctgcggttgcatttctaaatgaagttttttgtattgccccgtc

SEQ ID NO: 16176 - RNA, 192 nt, unidentified
  source 1..192: mol_type = other RNA; note = Related to CP042469.1; note = Clostridiales bacterium
acgaaagcgatagcgaatcttacagagacactctctgtgagcgggcgttgagtcgacgcctgtatcccgaaatccgaagatcgcagcctgcggcagcgataaaaattctgtcctcaccgtgctctggctacatttcatgtaggtctgcacggctgtgggtgaattttacgagagtttttgtatcgctttcgt

SEQ ID NO: 16177 - RNA, 185 nt, unidentified
  source 1..185: mol_type = other RNA; note = Related to VFMF01000001.1; note = Clostridium sp.
gcggaaacggcagcagattctgcggatttttttcgcaggaggacggcgagtcgccgcccccgaaagggtaaaaggacctgcgctgcgcgcgcagaaagcaatcctcaccgtgtaaccatacacttcatgtattttaaaacacggctgcggttgcattccgaaggaagattttgtgccttttccgc

SEQ ID NO: 16178 - RNA, 161 nt, unidentified
  source 1..161: mol_type = other RNA; note = Related to JAFXOM010000274.1; note = Oscillibacter sp.
ggcggggcggcagtctacaccgcgcttccacgtgcgggcgtccgcgagtcgcggccgcagcttattctcccgtcactttgtcgcgttccacgctccggttccttcggaaccccgttccttgcggaacgcagcttcgctgtctttttttgtgccgccccgcc

SEQ ID NO: 16179 - RNA, 136 nt, Flavobacterium sp.
  source 1..136: mol_type = other RNA; note = Related to NZ_QNVY02000005.1
ttaaaagaaatttgttggcttatgctagcgacggaaccgtgagtcactgttctgtaattgaatgttctttcaagcaccaggtttaaaagattctccgcagagctccgaacttttaaaccggtattcttaattgggg

SEQ ID NO: 16180 - RNA, 136 nt, Flavobacterium sp.
  source 1..136: mol_type = other RNA; note = Related to NZ_SMFN01000003.1; note = Flavobacterium sandaracinum
ttaaaagaaatttgttagcccaggttagcgatggagccgtgagtcactgttctgtaattgaatgttctttcaagcaccaggtttaaaagattctccgcagagctccgaacttttaaaccggttttcttaattggga

SEQ ID NO: 16181 - RNA, 136 nt, Flavobacterium sp.
  source 1..136: mol_type = other RNA; note = Related to NZ_FODN01000006.1; note = Flavobacterium sinopsychrotolerans
ttaaaataaatttgttagccctggttagcgacggagccgtgagtcactgttctgtaattgaatgttctttcaagcaccaggtttaaaagattctccgcagagctccgaacttttaaaccggttttcttaattggga

SEQ ID NO: 16182 - RNA, 135 nt, Flavobacterium sp.
  source 1..135: mol_type = other RNA; note = Related to NZ_SMLH01000005.1; note = Flavobacterium ranwuense
tcaaagaaatttgttagcccaggttaacatcggagccgtgagtcactgctctgtaattgaatgttctttcaagcaccaggtttaaaagattctccgcagagctccaaacttttaaaccggtattcttaatcgggg

SEQ ID NO: 16183 - RNA, 135 nt, Flavobacterium sp.
  source 1..135: mol_type = other RNA; note = Related to NZ_JQMS01000001.1
tcaaagaaatttgttagtctaggctagcgacggaaccgtgagtcactgttctgtaattgaatgctctttcaagcaccaggtttaaaagattctccgcagagctccgaacttttaaaccggtattcttaatcgggg

SEQ ID NO: 16184 - RNA, 135 nt, Flavobacterium sp.
  source 1..135: mol_type = other RNA; note = Related to NZ_JSYM01000001.1
ccaaagaaatttgctagtttaggctagcgacggagctgtgagtcactgttctgtaattgaatgctctttcaagcaccaggtttaaaagattctccgcagagctccgaactttcaaaccggtattcttaattgggg

SEQ ID NO: 16185 - RNA, 133 nt, Flavobacterium sp.
  source 1..133: mol_type = other RNA; note = Related to NZ_SMFM01000002.1; note = Flavobacterium caseinilyticum
ctagaaataaatttgtttacgttagaatcggagccgtgagtcactgctctgtaattgaatgttctttcaagcaccaggtttaaaagattctccgcagagctccgaacttttaaacctgtattcttaattgggg

SEQ ID NO: 16186 - RNA, 133 nt, Flavobacterium sp.
  source 1..133: mol_type = other RNA; note = Related to NZ_QKXH01000002.1; note = Flavobacterium aquariorum
tcccaaagagctgttagtgtaggctaacaacggagccgtgagtcattgctctgtaattgaatgctttttcaagcacaggctttaaaagatctccgcggagctacgaccttttaaacctgtttcttaattgggg

SEQ ID NO: 16187 - RNA, 134 nt, Flavobacterium sp.
  source 1..134: mol_type = other RNA; note = Related to JAHWYN010000011.1
ccataaagagctgttagtatgttactaacaacggagccgtgagtcactgctctgtaattgaatgctttttcaagcacaggctttaaaagatcttcgcagagctacgaccttttaaacctgtttcttaattggga

SEQ ID NO: 16188 - RNA, 136 nt, Flavobacterium sp.
  source 1..136: mol_type = other RNA; note = Related to JAGGNA010000001.1
ctcaaacagttcatttagctgaggctaatgacggagccgtgagtcactgttctgtaattgaatgctttttcaagcaccaggtttaaaagattctgcgcagagctccgaacttttaaaccggtattcttaattgggg

SEQ ID NO: 16189 - RNA, 136 nt, Flavobacterium sp.
  source 1..136: mol_type = other RNA; note = Related to NZ_FRCL01000005.1; note = Flavobacterium xinjiangense
ctcaaagaactcacatagccttggctagtgacggaaccgtgagtcactgttctgtatttgaacgctttttcaagcactaggtttaaaagatcctccgcagagctccgaacttttaaaccggtattcttaattgggg

SEQ ID NO: 16190 - RNA, 135 nt, Flavobacterium sp.
  source 1..135: mol_type = other RNA; note = Related to NZ_FOFZ01000005.1; note = Flavobacterium frigoris
tttaaagattgtgttagctcagctaacatcggagcagtgagtcactgttctgtaattgaatgctttttcaagcactgggtttaaaagatcctccgcagagctccgaaccttttaaacccgtattcctaattggag

SEQ ID NO: 16191 - RNA, 135 nt, Flavobacterium sp.
  source 1..135: mol_type = other RNA; note = Related to NZ_FNMV01000002.1; note = Flavobacterium degerlachei
tttaacgattttgttagcttagctaacatcggagcagtgagtcactgttctgtaattgaatgctttttcaagcactgggtttaaaaggccctccgcagagctccgaaccttttaaacccgtattcctaactggag

SEQ ID NO: 16192 - RNA, 134 nt, Flavobacterium sp.
  source 1..134: mol_type = other RNA; note = Related to NZ_PVUB01000001.1; note = Flavobacterium granuli
tctaaagattgtgttagctcagctagcgtcggagccgtgagtcactgttctgtaattgaatgttctttcaagcactggtttaaaaggctctacgcagagctccgaaccttttaaacccgtattcctaatgggag

SEQ ID NO: 16193 - RNA, 136 nt, Flavobacterium sp.
  source 1..136: mol_type = other RNA; note = Related to NZ_JADHEC010000014.1; note = Flavobacterium soyangense
ttccaagatttcatcagcattagctgatgaggagtcgtgagtcacaactctgtaattgaatgctttttcaagcaactatgtttaaaaggatctccgcagagctccgaaccttttaaacccgtgttcttaactggag

SEQ ID NO: 16194 - RNA, 136 nt, Flavobacterium sp.
  source 1..136: mol_type = other RNA; note = Related to PNNA01000057.1
cctgaaaatttcatcgacagtggtcgatgaggagtcgtgagtcactactctgtaatggaatgctttttcaagcaactgtgtttaaaaggatctccgcagagctccgaaccttttaaacccgtgttcttaactggag

SEQ ID NO: 16195 - RNA, 138 nt, unidentified
  source 1..138: mol_type = other RNA; note = Related to NZ_QNUG01000026.1; note = Epilithonimonas hispanica
ttaaaatattgtgatggtttcgaccacacctgagccgtgatgtcattgctcagtaattgaataggctttcaagccttcgtgtttaaaaggattccgctgaagctccacccttttaaacccgtattcactaatttgagt

SEQ ID NO: 16196 - RNA, 139 nt, unidentified
  source 1..139: mol_type = other RNA; note = Related to JACPUU010000004.1; note = Bacteroidetes bacterium
ttaaaataacgtgtcggtttcggccggcacctgagttgtgagtcactgctcagtaattgaatgggctttcaagctttcgggtttaaaaggggttccgctgagctccaccccttttaaacccgtattcactaatttgagc

SEQ ID NO: 16197 - RNA, 139 nt, unidentified
  source 1..139: mol_type = other RNA; note = Related to NZ_FTOB01000002.1; note = Zobellia uliginosa
tcaaaatattgtatcagtttcggctgataccggagccgtgagtcactgctctgtaattgaatgggctttcaagctctcgggcttaaaaggggttccgcagagctgcaccccttttaagcccgtattcactaatttgagt

SEQ ID NO: 16198 - RNA, 139 nt, unidentified
  source 1..139: mol_type = other RNA; note = Related to NZ_AMGM01000138.1; note = Cecembia lonarensis
ttaaaatattgtgttgacttcggttggcaccggagcagtgagtcactgttctgtaattgaatgggttttcaagccttcgggtttaagcggggttccgctgaggctccaccccgcttaaacccgtattcactaattgagt

SEQ ID NO: 16199 - RNA, 138 nt, unidentified
  source 1..138: mol_type = other RNA; note = Related to NZ_CP083760.1; note = Candidatus Sulfidibacterium hydrothermale
taaaagttttgtgttggctgtgctaacaccggaatagtgagtcactattctgtaatggaatgggctttcaagccttcgggtttaaaagggctgccgctgaggctccagcccttttaaacccgtattcactaacttgag

SEQ ID NO: 16200 - RNA, 138 nt, Flavobacterium sp.
  source 1..138: mol_type = other RNA; note = Related to NZ_MUHA01000018.1; note = Flavobacterium oncorhynchi
taaatagtttgtgttaatgtaaattaacaccggagccgtgatgtcactgttctgtaattgaatgctttttcaagccataaaattttaaagcttctccgcagagctcctaagctttaaaatttttattcatatttgagt

SEQ ID NO: 16201 - RNA, 139 nt, Flavobacterium sp.
  source 1..139: mol_type = other RNA; note = Related to MQTN01000055.1
taaataattagtggcatcaatataattgatgttgggtcaatgagtcattgccctgtaagtgaatgctttttcaagcatgcgataacaaatttcctcaaaaggatttgagaaaatttgttatcgctattcctaatttgag

SEQ ID NO: 16202 - RNA, 138 nt, unidentified
  source 1..138: mol_type = other RNA; note = Related to JADJAG010000004.1; note = Chitinophagaceae bacterium
ttgagatacttcttcaacttcggctgaagacggagcagtgagtcactgttctgtaaatgaatgggctttcaagcatcagggcgaaaagcttctccgccagagctccgaagcttttcgccctgtatcgataatttgagt

SEQ ID NO: 16203 - RNA, 124 nt, Citrobacter sp.
  source 1..124: mol_type = other RNA; note = Related to QFQQ01000035.1; note = Citrobacter freundii
tcattctgacttgcctttaggccggcttggcgagtcgtcaagctgtaagagaataacctttcgagctgtggggggtgtgacggtccgcaagtttcgctccgctgcgctacgctcaacattgcgc

SEQ ID NO: 16204 - RNA, 150 nt, unidentified
  source 1..150: mol_type = other RNA; note = Related to NZ_UGYW01000002.1; note = Sphingobacterium spiritivorum
gtaaagttatttatatcatttataaggtgtagcgagtcgttatgctgtagaagaatgaactttcaagcttacaggtggaaagaagcgtcaaagtttgcctcgttcctcagcaaacatttgccacttctttccacctttgtcgataggctc

SEQ ID NO: 16205 - RNA, 156 nt, unidentified
  source 1..156: mol_type = other RNA; note = Related to NZ_JAFEWD010000003.1; note = Pedobacter sp.
tgaaagagttttccgtttaggataaagaaactgggtggtgagttcacctccccggatggtgaatagcttttcaagcttggaagcgaacaagaggaaccgaaagcctcctccgtgcctcccccggcatttcgctccctcttgttcgctttgttcaaa

SEQ ID NO: 16206 - RNA, 159 nt, unidentified
  source 1..159: mol_type = other RNA; note = Related to JACHBZ010000008.1; note = Mucilaginibacter sp.
acagaagatatgcctggtgtattccaggagggatgatgagttcgtcattcccagttgagaaaaggctttcgagccttagcgacaaacataaaccgggagcctccgcctacggcctgcccccggcatcccgcttcatgtttgccgctttgttcaatgggc

SEQ ID NO: 16207 - RNA, 164 nt, unidentified
  source 1..164: mol_type = other RNA; note = Related to BMHZ01000001.1; note = Pedobacter zeae
tctgaagaaattgctctagtattctagaagccggaagggtgtagtcacctattctgtaagtgaacaggctttcaagcttgtgcattaaacataaatcaaaagtctccccctaaagggctccgccgacattttgcttcacgtttaatgcattgttttaatggggc

SEQ ID NO: 16208 - RNA, 162 nt, unidentified
  source 1..162: mol_type = other RNA; note = Related to NZ_FOAF01000001.1; note = Olivibacter domesticus
ttaaaataattcccccggttttccggggcgggtggatgttgtcatcccccttgtaagtgaacaggctttcaagcttgtggattaaacataaaccaaaagtctcctccccaaaggggcccctccgacattttgcttcatgtttaatccattgtttaaaggagc

SEQ ID NO: 16209 - RNA, 166 nt, unidentified
  source 1..166: mol_type = other RNA; note = Related to QGTG01000019.1; note = Chitinophaga sp.
taaaataattgctctagtgtgtctagaagccggagggatggagtcatcctctctgtaagagaacaggctttcaagcttgtgcattaaacgtaaatcaaaagtctccttccccagaggggccccttccgacattttgattcacgtttaatgcattgtttaagatggg

SEQ ID NO: 16210 - RNA, 139 nt, unidentified
  source 1..139: mol_type = other RNA; note = Related to NZ_CP094326.1; note = Zhouia spongiae
ccaaacggagcttgatttttaaaagaaatggctggtgaagtcacctgtccaaatagtgaaccttctttcaagctagcgaattttgaaaaggcaaaatcggagatatttccctttccaaaattcttattccgaacggggg

SEQ ID NO: 16211 - RNA, 138 nt, unidentified
  source 1..138: mol_type = other RNA; note = Related to NZ_VTZS01000003.1; note = Pareuzebyella sediminis
ccaaacagagcttgatttttaaagaattggttggtgaagtcaccattccaaatagtgaacattctttcaagctagcgaattttgaaaaggcaaaatcggagatatttcccttttcaaaattcttattccgaacagggg

SEQ ID NO: 16212 - RNA, 140 nt, unidentified
  source 1..140: mol_type = other RNA; note = Related to NZ_AFPB01000170.1; note = Aquimarina agarivorans
ccagacagagcttgatttttaaaagaaatggttggtgatgtcaccatgccaaatagtgaacattctttcaagctggcgaattttgaaaaggcaaaatcaatagatatttccctttccaaaattcttattccgaacggggg

SEQ ID NO: 16213 - RNA, 147 nt, unidentified
  source 1..147: mol_type = other RNA; note = Related to NZ_AFXZ01000051.1; note = Bizionia argentinensis
tcaaacagagcttgatttttaaaacttcaaaaaaaatggtcggtggtgtcacctttccaaatagtgaatattctttcaagcaagcgaattttgtaaagacaaaatcagagatatttgcctttacaaaattcttattccgaacggggg

SEQ ID NO: 16214 - RNA, 150 nt, unidentified
  source 1..150: mol_type = other RNA; note = Related to NZTP01000067.1; note = Proposed Altibacter sp.
tcaaaatgcacttgatttttgaatccaaaaataaaatgggtagtgaggtcactttcccaattagtgaacttagtttcaagcttataagtgcttataagaagttaaaatcggagattattaacttcttaacgcacttattccgaacggggg

SEQ ID NO: 16215 - RNA, 151 nt, unidentified
  source 1..151: mol_type = other RNA; note = Related to JABXHT010000059.1; note = Tenacibaculum sp.
tcaaaatgaaattcatttttgaatcctaaagaaattggatggtgacgtcacctacccgtatagtgaacataatttcaagcttaaggagcttttaaaatttaaaatccagtaggtatttaaatttcaaaatctcctttattccgaacggggg

SEQ ID NO: 16216 - RNA, 148 nt, unidentified
  source 1..148: mol_type = other RNA; note = Related to PAVO01000044.1; note = Crocinitomicaceae bacterium
tcaaaatgaaatccatttttagctcaataaaattcgggtggtgatgtcaccgacccttgttgagaacattatttcaagcttaagcagcttttaaaatttaaaatcagagatatttaaatttcaaatgctgctttattccgaacggggg

SEQ ID NO: 16217 - RNA, 153 nt, unidentified
  source 1..153: mol_type = other RNA; note = Related to NZ_JADPVI010000001.1; note = Kaistella gelatinilytica
ccaaaataaattaaatttttaatttaataagggcagtgattcactcgtccctaccttgggaacaaaatttcaagcttaacgagctttagctcattgaaatcttcccaaaacctcagaatttcaatgagctaaatctcatttttccgtttggga

SEQ ID NO: 16218 - RNA, 152 nt, unidentified
  source 1..152: mol_type = other RNA; note = Related to NZ_JAELVM010000001.1; note = Chryseobacterium endalhagicum
ccaaagcaaaatctttttttaaaaatatggggatgtgatgtcacataccctgatttgggaacataatttcaagctcaatgagcttgtaataaagcaaaatctccgctctgctacgatatttgctttattaaagctcatttttccgtttggga

SEQ ID NO: 16219 - RNA, 144 nt, Flavobacterium sp.
  source 1..144: mol_type = other RNA; note = Related to CP013992.1; note = Flavobacterium covae
ccaaaatgaattatatttttaatgtaatatatgggaagtgagtcactaaccctaaattgggaactaaatttcaagctcaatgagcttgtaaataagcaaaatcaaagatatttgcttatttaaagctcatttttccgtttggga

SEQ ID NO: 16220 - RNA, 142 nt, unidentified
  source 1..142: mol_type = other RNA; note = Related to NZ_FWXS01000003.1; note = Moheibacter sediminis
ccaaaataaattatatttttaatataatatgggatgtgagtcactaacccttatttgggaactaaatttcaagctcaatgagcttgtaactaagcaaaatctccgatatttgcttagttaaagctcatttttccgtttggga

SEQ ID NO: 16221 - RNA, 145 nt, unidentified
  source 1..145: mol_type = other RNA; note = Related to CP040516.1; note = Elizabethkingia miricola
ccaaaataaattatttttttaaattaatataatgggaagtgagtcactaacccttatttgggaactaaatttcaagctcaatgagcttgtaactaagcaaaatctacgatatttgcttagttaaagctcatttttccgtttggga

SEQ ID NO: 16222 - RNA, 144 nt, unidentified
  source 1..144: mol_type = other RNA; note = Related to NZ_CP075682.1; note = Chryseobacterium sp.
ttaaaagaattatctttttaaaaatattgggatgagatgtcttctaccccttattgggaacttattttcaagctcaatgagcttataacgtaacaaaatccagtaggtatttgttccgttaaagctcatttttccgctatggga

SEQ ID NO: 16223 - RNA, 153 nt, unidentified
  source 1..153: mol_type = other RNA; note = Related to CACSGR010000184.1; note = Tenacibaculum maritimum
tagaaatgaacttcatttttaataaagaattaaggatggtgagtcacctacccagttagagaacgttctttcaagctaaacaaggcttgcaaagatttaattgatgaaaaatcaatataaatcttcacaatccttgtttattccgaacggggg

SEQ ID NO: 16224 - RNA, 146 nt, unidentified
  source 1..146: mol_type = other RNA; note = Related to NZ_CP058984.1; note = Polaribacter sp.
tagaaatgaacttcatttttgataaagaataaggatggttagttacctacccaattagagaacattctttcaagctaaacaaggcttcacaaagatttaatcaaagatataaatcttcgcaaatccttgtttattccgaacggggg

SEQ ID NO: 16225 - RNA, 146 nt, unidentified
  source 1..146: mol_type = other RNA; note = Related to NZ_JPJI01000026.1; note = Nonlabens ulvanivorans
ccaatagaaaagaacttgatttttagaattctgaatggtgagtcaccatttatttagagaacttactttcaagcaaaacaacttaaaataaagattcaatccgtaggtattcatcttttttttaagttgttttatcagaacggggg

SEQ ID NO: 16226 - RNA, 137 nt, Trichodesmium erythraeum
  source 1..137: mol_type = other RNA; note = Related to JAGGDU010000099.1
tttatggaagtttaggtaaatttgtcgaaggtggcgaggtcgccatctgtttgagaacttgctttcaagctgtatcgtgtaaataaagggaaaatcaaagatatttccctttatttacactccatttatcgcgaaag

SEQ ID NO: 16227 - RNA, 134 nt, unidentified
  source 1..134: mol_type = other RNA; note = Related to NZ_RBCJ01000001.1; note = Ulvibacterium marinum
ttaaagaatagtatgctttgcataccagattagtgagtcattaatctgtaaaagaactgaatttcaagctcatcaacttttcaaaaggcctccgagtacctccgaccttttgaaaagtttattccaaattgagc

SEQ ID NO: 16228 - RNA, 138 nt, unidentified
  source 1..138: mol_type = other RNA; note = Related to JAGIPR010000013.1; note = Chryseobacterium jejuense
taaaaaataattatgtatgtttaacataccggattagtgaatcattaatctgtaaatgaactgaatttcaagctcatcaacttttcaaaaggcctccgtgtacctccgaccttttgaaaagtttattccaatttgagc

SEQ ID NO: 16229 - RNA, 138 nt, unidentified
  source 1..138: mol_type = other RNA; note = Related to NZ_FSRQ01000001.1; note = Chryseobacterium scophthalmum
taataagaaaatagtatggtaacatactaggattagtgaagtcactaatctgaaaaagaactagttttcaagcttatcaagttttcaaaagatctccgttgacctccgaccttttgaaaactttattccaatttgagc

SEQ ID NO: 16230 - RNA, 137 nt, unidentified
  source 1..137: mol_type = other RNA; note = Related to NZ_QBKT01000004.1; note = Kordia periserrulae
aaaaaataaaaaaaaagctatttttgtattggatatgcgagtcgtaatatctgtatagggaatataatttcagagcagttccgaatcaaatactcctccagagtcgtcgcatttgattcggccttccaaaatattgg

SEQ ID NO: 16231 - RNA, 132 nt, unidentified
  source 1..132: mol_type = other RNA; note = Related to NZ_SNZW01000015.1; note = Maribacter caenipelagi
attaaaaaaagcttaaatttacgatggatgtacgagtcgtaccatctgtatagggaatttaatttcagagcagttccgaatcaaatactcctccagagtcgtcgcatttgattcggccttccaaaatactgg

SEQ ID NO: 16232 - RNA, 132 nt, unidentified
  source 1..132: mol_type = other RNA; note = Related to NZ_VFPD01000001.1; note = Chryseobacterium aquifrigidense
ttaaaaatattttgtaattttacaatgatgtctgaagtcggactatcataatagggaatataaatttcgagcagttccgattcaaaagctacgccagagtctccgcttttgaatcggccttacaaatagggg

SEQ ID NO: 16233 - RNA, 148 nt, unidentified
  source 1..148: mol_type = other RNA; note = Related to JABZUV010000100.1; note = Prevotella pallens
ataaaagatcaatttgtcccaaagggcaaacggttgtatgagtcatacagctgtattggtataagttttcaagcgtttcaggctgctaatgttattcaggcggtcagagcccgccttcacaacattagcgcctgatgtcagatgacaa

SEQ ID NO: 16234 - RNA, 156 nt, unidentified
  source 1..156: mol_type = other RNA; note = Related to NZ_HE999448.1; note = Prevotella sp.
ttaaaataacatatcaatttgtcctagggggcaagcggttgtatgagtcatactgctgtataggtataaggtttcaagcgattcaggcttctaatgttgtttcagcggtcagagcccgcttccacaacattagagcctgatgtcagaagacaaaga

SEQ ID NO: 16235 - RNA, 145 nt, unidentified
  source 1..145: mol_type = other RNA; note = Related to JADYUK010000009.1; note = Prevotella loescheii
atacaaaataaaataggtaactatttcggtggagcgagtcgctctttctgtactgagtatgtaatttcaagcttttgagccaatttgcttctcatgcgcccagaggtcgcattcccagcaaattgtctcaaatatcgaaaaatat

SEQ ID NO: 16236 - RNA, 127 nt, unidentified
  source 1..127: mol_type = other RNA; note = Related to JACOOE010000015.1; note = Bacteroides sp.
tatatagcttaataaagcattgggaatgaagagtcttcattctttatcaggaatacaatttctagccttgcgacttaaagaactcctccagagtcgtcgtcctttaagtcgctgatcgtaaaatata

SEQ ID NO: 16237 - RNA, 135 nt, unidentified
  source 1..135: mol_type = other RNA; note = Related to SEFL01000207.1; note = Sphingobacteriales bacterium
ctagactaatgccgtactaatgtactaggaatggtgagtcatcattccgaaaagcgaactggctttcaagcacttcgggggctccgcccttccgccaaaggctccagggctacgcccccgttcaacaaggaggga

SEQ ID NO: 16238 - RNA, 129 nt, unidentified
  source 1..129: mol_type = other RNA; note = Related to JACHWX010000002.1; note = Mucilaginibacter gotjawali
tgattaggatactggcgtaagcccgtgggaacggtgagtcactgttccaaaaagcgaactccttttcaagcttatctgtggaagtttgctccgctgagctacacaaacttccacagattccaatacagc

SEQ ID NO: 16239 - RNA, 142 nt, unidentified
  source 1..142: mol_type = other RNA; note = Related to NZ_WQOA01000003.1; note = Oscillibacter sp.
tgatagcctttacactttcgggtgttggtgcgaagatgtcttcgcgccatgaatgaactgattttccagccccgcaacgaaattgtgcataagcgcgacggagcggcttctccacaatttcgttgcagccaccgcaaatgga

SEQ ID NO: 16240 - RNA, 142 nt, unidentified
  source 1..142: mol_type = other RNA; note = Related to JAFQBT010000084.1; note = Oscillospiraceae bacterium
ttgatagctttaacacttttgggtgttggttcgatgatgtcatcgtgctagtaatgaacttattttcaagccctgcaatgaaatagctttcgaagtcacgggagtgacttctgcatctatttcattgcagtcatcacaaata

SEQ ID NO: 16241 - RNA, 142 nt, unidentified
  source 1..142: mol_type = other RNA; note = Related to NZ_BJEY01000003.1; note = Listeria newyorkensis
ctaatagtttttctgtgtttagagaagaacatatgcgtctgatttcagcgtgtataaagagaaccttgtttcaagctattcattaagaacatccaccacaagggattgtggagtctgttcttaatgaagtatatcgcaaaac

SEQ ID NO: 16242 - RNA, 145 nt, unidentified
  source 1..145: mol_type = other RNA; note = Related to JAARWV010000001.1; note = Listeria booriae
ctaatagtttttctgagtttagagaagaacatatgcgtctgatttcagcgtgtataaagagaaccctatttcaagctattcattaagaacatccaccacaagggattgtggagtctgttcctaatgaaagtatatcgcaagagca

SEQ ID NO: 16243 - RNA, 137 nt, Bacillus sp.
  source 1..137: mol_type = other RNA; note = Related to NUVJ01000020.1; note = Bacillus cereus
gtttgaggattttttgcaatgtgcagcgagtcgctgtgcaaatatggactgatttactagcccaagctttgaaagttataaacttgaaatgggaatttaaagtgttacaactttcaaaggagcgttctgaaaaacga

SEQ ID NO: 16244 - RNA, 126 nt, unidentified
  source 1..126: mol_type = other RNA; note = Related to CP065770.1; note = Enterococcus faecium
ctagtttaatactccatatggagcatggtttagtgagttcgctaagctaaaaagaactgatttacaagcttacagcttaaagaattttcccttcggagaagaaaaaaatcctttaagctgatggaa

SEQ ID NO: 16245 - RNA, 138 nt, unidentified
  source 1..138: mol_type = other RNA; note = Related to NZ_CP032418.1; note = Paenisporosarcina cavernae
ttagtattttgaccgaggtcagtatagcgattcgttatacactaatgaactgattttcaagcctgggacaaacgtaattcacggccgaagtcagagcttcgaacctttgaattacgtttgtcatagcataaattggga

SEQ ID NO: 16246 - RNA, 135 nt, Bacillus sp.
  source 1..135: mol_type = other RNA; note = Related to NUJF01000002.1; note = Bacillus thuringiensis
agttagtattttgaccgaggtcacgtacagcgattcgttgtgctctagtggattgattttcaagcctagggactaaagtaattcaatcatgaaaacggagtttcaaatcttgaattactttagtcggaaagctga

SEQ ID NO: 16247 - RNA, 119 nt, unidentified
  source 1..119: mol_type = other RNA; note = Related to PJWF01000007.1; note = Enterococcus faecalis
tagaaaacttgttttttatcctatttgtcgatttcgtcaagtagtaagagaatttgatttcaagctttgtaacaaataatttttctcaaggattcgaaaaacttatttgttacactagc

SEQ ID NO: 16248 - RNA, 125 nt, unidentified
  source 1..125: mol_type = other RNA; note = Related to NZ_JACCEL010000030.1; note = Ruoffia tabacinasalis
ctagcaatttgataaaacttagttttatcctatttgatgatttcgtcaagtagtaagaggaaagagtttcaagctctaggatagataattttattcaaggattcataaaattatctatcctagga

SEQ ID NO: 16249 - RNA, 139 nt, unidentified
  source 1..139: mol_type = other RNA; note = Related to FPKH01000001.1; note = Janthinobacterium lividum
ttgacatcagatctagtggcgcaagccactgaacggcgattcgccgttcttatgaaatgttagtttcaagccttatcatggacttgcctttccgccaggaggcgtcaagacaagtccatgatggccttcggccttaaac

SEQ ID NO: 16250 - RNA, 134 nt, Nitrosomonas sp.
  source 1..134: mol_type = other RNA; note = Related to JAHBZZ010000012.1
gcaccagacctttatagcgaaagctatggaatggcgattcgccattctgggaagaactgactttcaagccataccaagagaactaaattgtccacggagttgacaatttattctcttggtaagcctgatggctt

SEQ ID NO: 16251 - RNA, 129 nt, unidentified
  source 1..129: mol_type = other RNA; note = Related to NZ_JWZY01000031.1; note = Herbaspirillum rubrisubalbicans
ctagaccttagtagcgaaagctacggatcggcgattcgccgttctaggaagaacttactttcaagccattactgaaggttcgaccaatccgtcggagacggcttggccaaaccttcaggagccttcggc

SEQ ID NO: 16252 - RNA, 138 nt, unidentified
  source 1..138: mol_type = other RNA; note = Related to NZ_CP014167.1; note = Paenibacillus yonginensis
ttagactttatgtggtttatccacaggtttgacgagtcgtcaagctaagaagaaccttatttactagccttagtgacaataactttcccttccgccagagtctccagaaaaagttattatcacaactccggcttcgcc

SEQ ID NO: 16253 - RNA, 141 nt, unidentified
  source 1..141: mol_type = other RNA; note = Related to NZ_FNAZ01000007.1; note = Paenibacillus sp.
ttagaactttatgtggttttatgccacaggtttggcgagtcgtcaagctaagaagaacattatttacaagccttggtgatcataacttttccctccgacggagtctacagaaaaagttatgaccaccactccggctgatgc

SEQ ID NO: 16254 - RNA, 139 nt, unidentified
  source 1..139: mol_type = other RNA; note = Related to NZ_JADBEL010000024.1; note = Sporosarcina limicola
ttagacttaaagtggtttaaccacgcgtttggcgagtcgccaagcgaagaagaaccttacttacaagcctggtgttaatagcttcgtctgttcgcctggaggctctcatccaaagctattaacacactacggctggcgc

SEQ ID NO: 16255 - RNA, 141 nt, unidentified
  source 1..141: mol_type = other RNA; note = Related to NZ_VCBL01000006.1; note = Rummeliibacillus suwonensis
attagactttgtgtgatacttatatcacacgtttggcgagtcgccaagcgaagaagaacagtattttctagccttttgttaataacttctccatttcccggaggtcaattccaaagttattaacaacactccggctaacgc

SEQ ID NO: 16256 - RNA, 141 nt, Bacillus sp.
  source 1..141: mol_type = other RNA; note = Related to JAEACL010000003.1; note = Bacillus halotolerans
ttagacttgttgtgatatttataatcacacgtttggcgagtcgccaagcgaagaagaacagtattttcaagccttttgttaataacttttcatctcccagaggtcgaattacaaagttattaacaacactacggctagcgc

SEQ ID NO: 16257 - RNA, 137 nt, unidentified
  source 1..137: mol_type = other RNA; note = Related to NZ_LFXJ01000013.1; note = Lysinibacillus xylanilyticus
ttagacttatgtgaataacaatcacatgtttggcgtttcgccaagcaaagaagaactgtatttctagcctgtcattaatagcttttcaatttcccggaggtcaatttcaaagctattaatggcactccggctttgcc

SEQ ID NO: 16258 - RNA, 140 nt, Bacillus sp.
  source 1..140: mol_type = other RNA; note = Related to JAEKFM010000007.1
ctagacttatggtttttttttaaaaaaaccaggtatggtgagtcaccatactaagaagaacttaatttcaagccctgtgtaatacatttaacgcgtcgggagacgctatataaatgtattacacaaccttaggcttgcgc

SEQ ID NO: 16259 - RNA, 128 nt, Bacillus sp.
  source 1..128: mol_type = other RNA; note = Related to NZ_CP071813.1; note = Bacillus mycoides
ttagaccttaacaatagttaattgtggctttggcgagtcgccaaggtaggaagaacttattttcaagcccattctaaaaggtgttcatccagcaggagctgttcagagccaccttttagacaccagac

SEQ ID NO: 16260 - RNA, 143 nt, unidentified
  source 1..143: mol_type = other RNA; note = Related to LR134338.1; note = Brevibacillus brevis
gaaaaatattagacttacgttgagaacacgttgtctgacgagtcgtcaggcggagaaggacttaatttcaagccatctttacaagcactaagcttcaaaccggagcttttcgcttagtgcttgtaaagtccgctgcgcttcaa

SEQ ID NO: 16261 - RNA, 137 nt, unidentified
  source 1..137: mol_type = other RNA; note = Related to JAFQBM010000021.1; note = Lachnospiraceae bacterium
taattagcctcattcacgcaagtgatggttgatgagttcgtcaatcagagaagaacttacttttctagcctgtgtttaaactccttccttttcgcaggagcgaaaactcatgagtttaaacacctacacaaattttt

SEQ ID NO: 16262 - RNA, 134 nt, unidentified
  source 1..134: mol_type = other RNA; note = Related to NZ_LT969517.1; note = Eisenbergiella sp.
ttagactcattcacattagtggtgattgatgagttcgtcaatcagagaagaaccagtttttcaagcctttgtgtgaacttagtctttttcacaggagtgaaaaagactaagttcacacagcttcgcaaatgaat

SEQ ID NO: 16263 - RNA, 129 nt, unidentified
  source 1..129: mol_type = other RNA; note = Related to NZ_FOLQ01000021.1; note = Spirosoma endophyticum
ttagacttacgcgtgaaaacgcaggattgatgagtcatcaatctaagaagtaccttacatcgagccaaaacctaatcgtttatttggtagcagagctacctgcataaacgattaggttccgacgagaaa

SEQ ID NO: 16264 - RNA, 139 nt, unidentified
  source 1..139: mol_type = other RNA; note = Related to QRIC01000038.1; note = Dorea longicatena
aatctttagacttagcacttatgtgcgggattagcgagtcgttaatctttgaggaacttacttttcgagccggagtaatacttgtccatgattttacaggagtaaaatcctgaacaagtattacgggtcgtgattttgt

SEQ ID NO: 16265 - RNA, 136 nt, unidentified
  source 1..136: mol_type = other RNA; note = Related to FMEZ01000001.1; note = Ruminococcus sp.
tttagactttgcacgtatggtgcgggattagcgagtcgttaatctttgaagaacttacttttcgagccggagtaatacttgttcatgattttacaggagtaaaatccaaaacaagtattactggtcgtgattttgt

SEQ ID NO: 16266 - RNA, 140 nt, unidentified
  source 1..140: mol_type = other RNA; note = Related to JACRSZ010000030.1; note = Proposed Jingyaoa shaoxingensis
aaatctttagacttagcacatttgtgcgggattagcgagtcgttaatcttagaggaacttatttttcgagccatagtaagacttgttcgttcttttacaggagtaaaatcccaaacaagtcttacaggtcgtgattttgt

SEQ ID NO: 16267 - RNA, 138 nt, unidentified
  source 1..138: mol_type = other RNA; note = Related to RKBT01000103.1; note = Solobacterium sp.
tttagactttgcattttatatgcgggaatagcgagtcgttattctttggagaatggtttttactagccattctagaaaagatttaatttctcacaggagttctaaatttaaatcttttctagctgcttgtaaattgaa

SEQ ID NO: 16268 - RNA, 138 nt, unidentified
  source 1..138: mol_type = other RNA; note = Related to JAFYBR010000063.1; note = Lachnospiraceae bacterium
tttagacgatacacttagaaacaggtgtaagggatccgcgagtcgcggatctaagaggaacttgtcctctggtcgcctgaatccgccgcgctttacaggagtaaagcgccactgcttcaggcattgcgcgctttcata

SEQ ID NO: 16269 - RNA, 135 nt, unidentified
  source 1..135: mol_type = other RNA; note = Related to NZ_LT635539.1; note = Blautia sp.
ttagaactatgcacaatggtgcgggaatggcgagtcgtcattcttagaagaacttgcttttctagccatatgacagattactcgtcaatttatgggaataaattaccaagtaatctgtcacagtgcttcccaaac

SEQ ID NO: 16270 - RNA, 136 nt, unidentified
  source 1..136: mol_type = other RNA; note = Related to NZ_CP028101.1; note = Fusobacterium nucleatum
atagattaattattaatttatagggattgatgagtcatcaatctagggagaacagattttcaagcctgtggataagaactattcatatttctctagaaagagcaatattcatagttcttatctgcaagaattgcgt

SEQ ID NO: 16271 - RNA, 127 nt, unidentified
  source 1..127: mol_type = other RNA; note = Related to WWTL01000016.1; note = Clostridium sp.
ctagacttatgcacttggtgcggggttggcgagtcgtcaacttaagaagaacttattttcaagcctgtgtaagaacaagctggattttgcgggagcaaaatcaatcttgttcttacgtaatcgagaa

SEQ ID NO: 16272 - RNA, 133 nt, unidentified
  source 1..133: mol_type = other RNA; note = Related to NZ_LT635469.1; note = Blautia sp.
ctagacttatgcactttgtgcgaggttggcgagtctgccaacttaagaagaacttattaacaagcctgtgtaagaacaagttcgattttgcgggagcaaaatctatcttgttcttacaaactcgagaattcat

SEQ ID NO: 16273 - RNA, 134 nt, unidentified
  source 1..134: mol_type = other RNA; note = Related to QTVG01000007.1; note = Eubacterium sp.
ctagacttatgcactttgtgcagggttgtcgagtctgtcaacctaagaagaacttattttcaagcctgtgtaagagcaatctttattttgcaggagcaaaatcaagattgttcttacgtattcgagaattcgga

SEQ ID NO: 16274 - RNA, 135 nt, unidentified
  source 1..135: mol_type = other RNA; note = Related to VMKF01000001.1; note = Geobacter sp.
tctagaccatgtgactctgtcacgtgaatggcgagtcgccattctaggaagaactgcttttctagccccgtatcgtcagacacttcgtcaattggatattgccgcagtgtctgacgatactacttcgcttcgctt

SEQ ID NO: 16275 - RNA, 123 nt, unidentified
  source 1..123: mol_type = other RNA; note = Related to QZJW01000035.1; note = candidate division WS5 bacterium
ctagccctatggtgagagatcaccgggatggcgagtcgtcatcctaggaagaactggctttcgagcctttgtgaacccggactcgtgcgccggaggcacccgagcccgggttcacaataacta

SEQ ID NO: 16276 - RNA, 131 nt, unidentified
  source 1..131: mol_type = other RNA; note = Related to JAEINN010000002.1; note = Maridesulfovibrio ferrireducens
tcattagaactttgggattactcccaatagagtggcgagtcgccattcccgaacgaacatcctttcaagccttttatgatcgtagcagctgctccggaggagacagctactacaatcataacgctgcgggc

SEQ ID NO: 16277 - RNA, 129 nt, unidentified
  source 1..129: mol_type = other RNA; note = Related to NC_020304.1; note = Desulfocapsa sulfexigens
ctagccttagtggcttagccacggaatggcgagtcgccattctggggagaacttgctttcaagcccaggcgaagattcaccaactcttggaaagagttggcgaatcttcgccccgcttccgcaaaagcc

SEQ ID NO: 16278 - RNA, 134 nt, unidentified
  source 1..134: mol_type = other RNA; note = Related to NZ_CP040896.1; note = Hymenobacter sp.
ttagtatcaggtagcttttaaagctacagggttgatgagtctgtcaacctgatgagaacttacattcgagcaattaataatgaaataaagtcaaagggatttgtcttcatctcattattaattacggcatgaca

SEQ ID NO: 16279 - RNA, 105 nt, unidentified
  source 1..105: mol_type = other RNA; note = Related to SEFI01001149.1; note = Sphingobacteriaceae bacterium
gattagcgagtcgttaatctaagaagaaccgactttcaagcggcatcaccgacactcattaagcgtcggagatgcttaatgagtgtcggtgatgccgctccggct

SEQ ID NO: 16280 - RNA, 138 nt, unidentified
  source 1..138: mol_type = other RNA; note = Related to JAFVUY010000108.1; note = Bacilli bacterium
tacatcagaatgtatattattaaatataccgattggcgagtcgccaatcttttaggaactggctttcaagccctgcaacgagtttcttttctttactgggaagtaaagacccgaaactcgttacagctcgcagttgga

SEQ ID NO: 16281 - RNA, 133 nt, unidentified
  source 1..133: mol_type = other RNA; note = Related to SVPN01000006.1; note = Oscillospiraceae bacterium
acatcagaacgtattctatgaatacagattggcgagtcgtcaatcatttaagaactgcctttcaagccttgcgtctacttttatcttttggtggaaccaaaaggctaaaagtagacgcagcttcgcaacgtgt

SEQ ID NO: 16282 - RNA, 140 nt, unidentified
  source 1..140: mol_type = other RNA; note = Related to NZ_CP060696.1; note = Caproicibacterium amylolyticum
tgcatcagactgtattcgcaagaataccgattggcgagtcgtcaatcttttatgaactgtctttcaagccccgcatagattttttcatacttcacttggaagtgaagccaaaaaatctatgcggctacgcagcaagctgc

SEQ ID NO: 16283 - RNA, 140 nt, unidentified
  source 1..140: mol_type = other RNA; note = Related to NZ_FOAT01000022.1; note = Ruminococcus albus
gtaccagaattgtattcaatatgtgaatacggattggcgagtcgtcaatcatttaggaacatgctttcaagcctttcgacaaatgtcttcattttcctagaaggaaaatgaatcaatttgtcgaaagctgagcaaagctc

SEQ ID NO: 16284 - RNA, 132 nt, unidentified
  source 1..132: mol_type = other RNA; note = Related to NZ_BQKV01000037.1; note = Faecalibacterium gallinarum
ctagaactatattctgtaagaatataatgaatggcgagtcgtcattctttgaagaaccccttttcgagccctcagggattcaaagcaaaagacggagcttttcctttgaatccctgatgcttcgcaagagtt

SEQ ID NO: 16285 - RNA, 134 nt, unidentified
  source 1..134: mol_type = other RNA; note = Related to WKQN01000003.1; note = Faecalibacterium prausnitzii
ctagaactatattctgcacaagaatataatggatgacgagtcgtcaccctttggagaaccatttttctagccctcagggattcaaatcaaaagacggagctttttctttgaatccctgatgcttcgcaagagaa

SEQ ID NO: 16286 - RNA, 93 nt, unidentified
  source 1..93: mol_type = other RNA; note = Related to NZ_QGNY01000001.1; note = Pedobacter sp.
ttagctcaagtggcccgtgagggctacgggtaagcgattcgtttacctgaggggaactttctttctagcgatttatacgatgagaaaatagac

SEQ ID NO: 16287 - RNA, 116 nt, unidentified
  source 1..116: mol_type = other RNA; note = Related to NRSW01000001.1; note = Mucilaginibacter sp.
ttagctcaagcagcttcggttgcggattagcgagtcgttaatctgaggagaacattgtttcgagcgtttgatattgttgagtttcgcggagctcttaggtgtatagcgcctcgagc

SEQ ID NO: 16288 - RNA, 130 nt, unidentified
  source 1..130: mol_type = other RNA; note = Related to CDNR01000033.1; note = Paeniclostridium sordellii
ctagaaacaaatggttttgtaccattagcagtacgagtcgtactgcctttgagaactgaatttcaagctacttcacagaaggcactccttcgggactcagtagcgccttctgtgaatgccccaaaggggc

SEQ ID NO: 16289 - RNA, 135 nt, unidentified
  source 1..135: mol_type = other RNA; note = Related to SEFT01000010.1; note = Sphingobacteriales bacterium
ttagactcggtagctgcttagcagttacagataggtgattcacctatcggagaagaaccagctttcaagctactttaataaatatctgcgttcgcaggagctctcttgagtatttattgaaagctatatataagt

SEQ ID NO: 16290 - RNA, 130 nt, unidentified
  source 1..130: mol_type = other RNA; note = Related to QUJF01000028.1; note = Butyricicoccus sp.
tgttagcgtatcgtttataacgatagtaatgcgagttcgtgttacgagtaaattctagttttcaagccccagataaacagttattttgtcgaggacgtcaaaataactgtttatctgaaccacttttgac

SEQ ID NO: 16291 - RNA, 142 nt, unidentified
  source 1..142: mol_type = other RNA; note = Related to JAFVWM010000017.1; note = Alphaproteobacteria bacterium
attagtcttagcaacttttgttgcgctgtaacgagtcgttatggtagaatgaactttcttttcgagccttagatacgctcaactttgtttaaacacagaggtttaaccgaaagttaagcgtatctaactcgcaagctcgtgt

SEQ ID NO: 16292 - RNA, 138 nt, unidentified
  source 1..138: mol_type = other RNA; note = Related to JAFXYS010000380.1; note = Candidatus Saccharibacteria bacterium
gaagaactagcctagacagaaatgtcggaacagcgagtcgttgttcttgattggaatagggttttaaccctcacttcaatgtgcgctcgaatcatcgatgatgcttctcgtttacattgaagtcattaaggctctcac

SEQ ID NO: 16293 - RNA, 138 nt, unidentified
  source 1..138: mol_type = other RNA; note = Related to JAGBFB010000015.1; note = Spirochaetaceae bacterium
agagaactagccatttgcagtaatgcatagaattacgagtcgtaattcgagacgagaacacccttttagcgtaggtcaaaagccttcgtatgatttggaaaatcatctcagtcttttgacctacgtatagaaatctga

SEQ ID NO: 16294 - RNA, 133 nt, unidentified
  source 1..133: mol_type = other RNA; note = Related to NZ_VTYX01000020.1; note = Prevotella copri
ttagtttaatgcgagaaatgcatggaattgtgagtcacaattcttctgagtaattacatcaagattgccattacaataaattttgtatggcaggagccatacaaaatttattgtaatggctggagccaaaggc

SEQ ID NO: 16295 - RNA, 141 nt, unidentified
  source 1..141: mol_type = other RNA; note = Related to JAGZTO010000032.1; note = Prevotella sp.
ataaagatattagttaagtgcattgaagcatggaaaagtgagtcacttttctttagaatagttataatcaagcctgccactccataaaatttggagtgcaggagcacttcaaattttatggagtggccgaacccttcgggt

SEQ ID NO: 16296 - RNA, 133 nt, unidentified
  source 1..133: mol_type = other RNA; note = Related to SUXO01000014.1; note = Bacteroidales bacterium
ttagtttgtccacttcggtgtgaggattagcgattcgttaatctactgagaatcttctttcaagccaaagtaatgtttagtttttacttcttggaagaagtaaaaactaaacattacttcggtcgcaagacaa

SEQ ID NO: 16297 - RNA, 138 nt, unidentified
  source 1..138: mol_type = other RNA; note = Related to MKRS01000610.1; note = Bacteroidales bacterium 45-6
tttttagtttgtcacatgaaaatgtgaagattgacgagtcgtcaatcgactgagaatttcctttcaagcctggaagtaagatgcaaattttgctttctggagaaagcgaaatttgcatcttacttcgactgcgcaagc

SEQ ID NO: 16298 - RNA, 140 nt, unidentified
  source 1..140: mol_type = other RNA; note = Related to NZ_JAJJWI010000010.1; note = Pontibacter silvestris
acattagactcagatggcttcggccatcatgaaaggcgagtcgcctttctgagaggaaccggttttcaagccgtttagtaaataaatgtttgttttgcggagcagaaacaaatcatttatttacacgcgctgcggggttt

SEQ ID NO: 16299 - RNA, 132 nt, unidentified
  source 1..132: mol_type = other RNA; note = Related to JACIGQ010000001.1; note = Rhizobium leguminosarum
ttagaacccagcggtaagaccgcaggatcggcgagtcggcgatctggattggatggtactttaggcccattcaatggaaatgaatttttcacggaggaaaaatgtaatttccattgaagcgccttacggcgc

SEQ ID NO: 16300 - RNA, 135 nt, unidentified
  source 1..135: mol_type = other RNA; note = Related to JACYUZ010000001.1; note = Rhizobium sp.
ttagaaccaagcggtaaaaccgcaggattggcgagtcgtcaatctggagtggatggaactttaggcccattcaatggaaatgaatttttcacggagcgaaaaataagtaatttccattgaagcgcctaacggcgc

SEQ ID NO: 16301 - RNA, 133 nt, unidentified
  source 1..133: mol_type = other RNA; note = Related to NZ_LJIB01000039.1; note = Rhizobium sp.
ttagaccccagcggtaatgccgcaggattggcgagtcgccaatctggattggatggcacttcaggcccattcaatggaaatgaatttttcacggagcgaaaaatgtaatttccattgaagcgcctaaaggcgc

SEQ ID NO: 16302 - RNA, 133 nt, unidentified
  source 1..133: mol_type = other RNA; note = Related to NZ_LSVB01000004.1; note = Brucella anthropi
ttagaccctagcggccagaccgcaggatgagcgagtcgcgcatctggaacggaccttactttaggcccacccaacgaaaacgaatttttcacatagtgaaaaatatagttttcgttgtagcgcccaaagggcg

SEQ ID NO: 16303 - RNA, 132 nt, unidentified
  source 1..132: mol_type = other RNA; note = Related to JAAXMM010000032.1; note = Agrobacterium sp.
ttagaccctagcggcttgaccgcaggatgagcgagtcgctcatctggattggaccgtatttcaggcccactctatgaaaacgaattttccacggagtggaaaatgtcgttttcatagtcccgcccttcgggc

SEQ ID NO: 16304 - RNA, 132 nt, unidentified
  source 1..132: mol_type = other RNA; note = Related to NZ_VZDO01000003.1; note = Aureimonas leprariae
ttagaccctagcgactgacgtcgcaggatgagcgagtcgttcatctggcgtgaacatgactttaggcccttgattggaacgagttctccacggagtgtcaaacgtcattccaatcaaagcgcctaaaggcgc

SEQ ID NO: 16305 - RNA, 120 nt, unidentified
  source 1..120: mol_type = other RNA; note = Related to CP015231.1; note = Tritonibacter mobilis
tgagtagttttgatactgcaagccgggatggcgagtcgccatccattgaccggacgtacaacaagccattaccgtcacaattttctcgcggagctgcgaaaactgtgacggtaattcgga

SEQ ID NO: 16306 - RNA, 119 nt, unidentified
  source 1..119: mol_type = other RNA; note = Related to NZ_KI421513.1; note = Leisingera caerulea
tgagtagtttaacactgcaagccgggatggcgagtcgccatccattgaccggacgtacaacaagccattaccgtcacaattttctcgcggagctgcgaaaactgtgacggtaattcgga

SEQ ID NO: 16307 - RNA, 119 nt, unidentified
  source 1..119: mol_type = other RNA; note = Related to JADCGC010000017.1; note = Roseomonas sp.
gaaagattacgagctggggcggcgagtcgccgtccatggtcggactgagaacaagccactacctttgccagcctctcgcggagctgcgaggccgtcaaaggtgttgctgcgtccttcgt

SEQ ID NO: 16308 - RNA, 134 nt, unidentified
  source 1..134: mol_type = other RNA; note = Related to NZ_WWEN01000004.1; note = Thalassobius mangrovi
ttagtactgacggttgacgctagtcgactgtcggagtcgcgagtcgcgtctcttagatcggacctagtacgagccatcgccttcgcgatgcttcgcaggagcaaagaaccgcgaaggcgatgtcgtccttacgt

SEQ ID NO: 16309 - RNA, 133 nt, unidentified
  source 1..133: mol_type = other RNA; note = Related to JAEPMN010000068.1; note = Shimia sp.
ttagtgctgacggttgacctcggtcaatcgtcggggatgcgagtcgcttccctttgatcggacctagtacaagccatcgtcttcgcgatactttgcggagcaaagaagcgcgaagacgaactcgtccttacgt

SEQ ID NO: 16310 - RNA, 125 nt, unidentified
  source 1..125: mol_type = other RNA; note = Related to RZOF01000138.1; note = Mesorhizobium sp.
tgagtcaaaagctcatgcgtcggtgcgtcgagtcgacgtgcaagattgaacgtaacatcaagccgttggcacaccttcggctcacaggagctcacctctcggtgtgccaatgctccttcgtcgca

SEQ ID NO: 16311 - RNA, 137 nt, unidentified
  source 1..137: mol_type = other RNA; note = Related to NZ_CP090423.1; note = Stenotrophomonas maltophilia
ggcgagttagcacatgccgcaaggcaggatcggcgagtcgccgtatctggaaagaactgtcattcaagcctcaggccgaatccgtcgtcgcgagcaggagctcgcaacgccgccttcgacctgcgccatgaagccgg

SEQ ID NO: 16312 - RNA, 137 nt, unidentified
  source 1..137: mol_type = other RNA; note = Related to NZ_KL638873.1; note = Xanthomonas arboricola
ggggaattagcacatgccgaaaggcaagatcggcgagtcgccgcatctgggaagaactgtcaatcaagccttaggccgaatccgccgtcgcgagcaggagctcgcaacgtcgccttcgacctgcgccatgaaaccgg

SEQ ID NO: 16313 - RNA, 133 nt, unidentified
  source 1..133: mol_type = other RNA; note = Related to NZ_JVIE01000007.1; note = Stenotrophomonas maltophilia
ttcaagttagcacatgccgaaaggcaaggccggcgagtcgccgagcctgaagcgaactatcattcaagcctcaggccaaaagcgtcattgcgagcaggagctcgcaacgccgttttggcctgcgccatgaaac

SEQ ID NO: 16314 - RNA, 129 nt, unidentified
  source 1..129: mol_type = other RNA; note = Related to NZ_CP029551.1; note = Methylobacterium sp.
ggaagaccacgtgggcaaccacaggagcggcgagtcgccgttctggagtgaactggctttctagcagggtgccagactgattttgaccggaggtcaaaagtcagccaggcaccgctcggctaaagcctc

SEQ ID NO: 16315 - RNA, 133 nt, unidentified
  source 1..133: mol_type = other RNA; note = Related to NZ_CP039546.1; note = Methylorubrum populi
ggaagcccatgtgggtaaccacgtgaatggcgagtcgccattctggagtgaacatcctttcgagctgctgatgaaaaccaaatttcggctagaagccaaaatccggttctcatcagacgctcggcaaagccga

SEQ ID NO: 16316 - RNA, 133 nt, unidentified
  source 1..133: mol_type = other RNA; note = Related to JAGQPV010000303.1; note = Planctomycetaceae bacterium
gtagtcccatcggcttggccgaggggcgtcgagtcgacgccctggggaactctcccctttcaagcccagcacattgaccaagcacctgaccgggaggtcaggttggttggtcaatgtgctcgctcagcttcgc

SEQ ID NO: 16317 - RNA, 132 nt, unidentified
  source 1..132: mol_type = other RNA; note = Related to NRRE01000008.1; note = Rhodovibrio salinarum
ctagtcctatgtggtttgaccacacgagtggcgagtcgccactcgaggaagaacgctccttcgagccagcgagcgggcggggttccccaaaaggatttggcgaaccccgcccgctcgtgcgtcggcaaagca

SEQ ID NO: 16318 - RNA, 132 nt, unidentified
  source 1..132: mol_type = other RNA; note = Related to NZ_JACDIT010000005.1; note = Chthonobacter albigriseus
tacgacgctagcggctctgccgcacgggaagcgagtcgcttcccaagggtgaactgacgaaacgacctagtcatggaccaatttctgcgcaggagctcgaaatcagtccatgactagcgctttcagcgctgc

SEQ ID NO: 16319 - RNA, 135 nt, unidentified
  source 1..135: mol_type = other RNA; note = Related to NZ_AP022332.1; note = Methylosinus sp.
gtgctagcagctagcgactcgatcgctaggaatggcgagtcgccattcttgagagaaccggctttcaagccctggtccggcgccctcgaactgcgggagcacttcgacggcgccggaccatgctcccgttggtcg

SEQ ID NO: 16320 - RNA, 130 nt, unidentified
  source 1..130: mol_type = other RNA; note = Related to JALLPZ010000001.1; note = Thalassospira xiamenensis
ctagtactagtggccatagccacacgagcggtgagtcaccgttcttgaaagaactggctttcaagcctcgatctaagggagctttcaattgccggaggcaattgagaagctcccttagatagctccggaa

SEQ ID NO: 16321 - RNA, 123 nt, unidentified
  source 1..123: mol_type = other RNA; note = Related to CZAO01000003.1; note = Bacteroides uniformis
attagctaagtctgaggtccacaagttaccaaagatattacagccccttggctgtgagtgcaaaattaagaatcattttactaataattatgacagacaagtctgtcataattatcagcctat

SEQ ID NO: 16322 - RNA, 124 nt, unidentified
  source 1..124: mol_type = other RNA; note = Related to JAAVFK010000042.1; note = Bacteroidales bacterium
tatagcagtatctgtgaaaacagaggcctgtacccgtttggtgcagtctatattaagctactttacatgatttctgtgtcacacccttcgttgcactacaggcgcgacacagaattcgccgata

SEQ ID NO: 16323 - RNA, 125 nt, unidentified
  source 1..125: mol_type = other RNA; note = Related to JAFQIH010000031.1; note = Alistipes sp.
attagcactgtctgcgaaagcagaagcctgcgcccgtttggcgcagacgagttaaagcaactttacatgattattatgtcataccccttcgctacgctcgaagcatgacataatagtcgccgatt

SEQ ID NO: 16324 - RNA, 114 nt, unidentified
  source 1..114: mol_type = other RNA; note = Related to SUYB01000005.1; note = Bacteroidaceae bacterium
attagcagtatctgtacagacagaagcctgcgtccgtttgatgcaggaaagttaaagtcacattacatgatttctatgtcacaccccatgggcgcgacatagaagtcgccgaaa

SEQ ID NO: 16325 - RNA, 107 nt, Flavobacterium sp.
  source 1..107: mol_type = other RNA; note = Related to BJSX01000096.1; note = Flavobacterium psychrophilum
attagctatgtcatttattgactttttaatcccttttggattaagaataattaaagctaaattatactgattagtgtgcaacaaaagtcgcacactattcactccgt

SEQ ID NO: 16326 - RNA, 120 nt, unidentified
  source 1..120: mol_type = other RNA; note = Related to JAGPFU010000113.1; note = Paludibacteraceae bacterium
attagctttgtcaattaattttgacctctttgtcccgttcggattaagggttatttaagctacattatactgatttgtgcgtaccacctcgtgcctcgggtcacgcacaattcacttcgt

SEQ ID NO: 16327 - RNA, 120 nt, Flavobacterium sp.
  source 1..120: mol_type = other RNA; note = Related to NZ_CP016907.1; note = Flavobacterium anhuiense
attagctttgtcaataaaaattgacttctttgtcccgtttggattaaggactattaaagctacattatactgatttgtgcataacacctcgttcctcgggccacgcacaattcacttcgt

SEQ ID NO: 16328 - RNA, 131 nt, Flavobacterium sp.
  source 1..131: mol_type = other RNA; note = Related to JAEUTX010000024.1; note = Flavobacterium lindanitolerans
attagcttagtctttatttttttacataaagacttcttaagactgtttgtctataagaataaatcaagctacattatactgattcatgtgcaacgcctgcgggcactcgggttgcacatgattcacttcgt

SEQ ID NO: 16329 - RNA, 128 nt, unidentified
  source 1..128: mol_type = other RNA; note = Related to AP023049.1; note = Alistipes indistinctus
attagctgtgtcttctagaagacatcttgagctcgtttggctcaagagtaattaaagctacattatactgattaatgtgtaatacctgcgttcgcaagctcacttgtatcacacattattcactcaga

SEQ ID NO: 16330 - RNA, 128 nt, unidentified
  source 1..128: mol_type = other RNA; note = Related to NZ_FNBN01000017.1; note = Chitinophaga filiformis
tttagcctttctctcgcaagagaaatcaaagccttgttttgatatgtctaaagctactttatactaaataatgtacaacaatcgccttcttgcgtcgcggggcgttgctgtacatcattcactaacgt

SEQ ID NO: 16331 - RNA, 128 nt, unidentified
  source 1..128: mol_type = other RNA; note = Related to PPEG02000004.1; note = Chryseobacterium viscerum
tttagttgtttctctgtggtaagagaagatttgcttcttgagcaaagtaataaataaagctactttatattatcttgatgaaaaacctttccacttctttcctttcctgtttttcatcaacacaacat

SEQ ID NO: 16332 - RNA, 126 nt, unidentified
  source 1..126: mol_type = other RNA; note = Related to JAAALB010000001.1; note = Cellulophaga sp.
attagctgttctcctagtgagataacttgttctttgaacaaggcaattctaaagctactttacattaactggtgtgtaacatatccaacgcacgggcaaccctgctgttacacaccaatcactaat

SEQ ID NO: 16333 - RNA, 143 nt, unidentified
  source 1..143: mol_type = other RNA; note = Related to JALKBC010000033.1; note = Arenibacter sp.
gcaagcaatttcaggtttaggttcttttctaaaggagattagacttgaatgggcaggcagtagtctgttcagggttgaagttacttttcaacacatccagtacaacatatcccttcgggagagttgtgctggatatgctacgc

SEQ ID NO: 16334 - RNA, 145 nt, unidentified
  source 1..145: mol_type = other RNA; note = Related to NZ_LXTT01000008.1; note = Muricauda sp.
gcaagcaatttcaggcataactacatttttttaaatgagatagggcctggaggctcgggcagtagtccgtgcagggttgaagttacttttcaacacttccagtacaacatatcccttcgggagagttgtgctggaaatgctccgc

SEQ ID NO: 16335 - RNA, 146 nt, unidentified
  source 1..146: mol_type = other RNA; note = Related to NZ_FNQK01000016.1; note = Bizionia paragorgiae
gcaagctatttcgagtcagtttgtgttcgtgagaacatttgaaggacaagaactcatagacagtagtttatgtaggactgaagcatcttttcaacttttactacacaaaaccttcctacgtcaggttcgtgtagtaaatgcttcgc

SEQ ID NO: 16336 - RNA, 134 nt, unidentified
  source 1..134: mol_type = other RNA; note = Related to NZ_WNKF01000001.1; note = Cyclobacterium roseum
gcaagccgtttcgagtcaatttgtatttaaaggacgagaatgcttgggtagtaatccgagtaggactgaagcatcttttcaacattttcagcacaacgcctcactgcgttcgggtcgtgctgaagatgcttcgc

SEQ ID NO: 16337 - RNA, 146 nt, unidentified
  source 1..146: mol_type = other RNA; note = Related to MENU01000192.1; note = Bacteroidetes bacterium GWE2_29_8
gcaagcaatttcgagtcaatttgtgtttgaaaaaacatttaaagggcaagaatacctgggtagttatccaagtatggctgaagcaacttttcaacatttactacacaagatcctccttcgtcagactcgtgtagtatatgcttcgc

SEQ ID NO: 16338 - RNA, 138 nt, Flavobacterium sp.
  source 1..138: mol_type = other RNA; note = Related to NZ_CP030261.1; note = Flavobacterium fluviale
gcaagcaatttcaagtcatttaaataagtttaaatcttgatttcctggatagttatccaagaatttagtgaagtaacttttcaaactttactgcacaatatcctcactacgttccggtttgtgcagtaatgctcacgc

SEQ ID NO: 16339 - RNA, 149 nt, Flavobacterium sp.
  source 1..149: mol_type = other RNA; note = Related to NZ_JADHEC010000003.1; note = Flavobacterium soyangense
gcaagcaatttcaagtcaatgtagttttttaactacatttaaagggcaagaatacccgggtagttatccaagtagggctgaagcatcttttcatcatttcccacacaacatcctcctaaaaagtcggacctgtgtgggatatgcttcgc

SEQ ID NO: 16340 - RNA, 142 nt, unidentified
  source 1..142: mol_type = other RNA; note = Related to NZ_CP074436.1; note = Polaribacter sp.
gcaagcaatatcttgtcttaatacaaattgtaataagaaaggtgacttgaacagttgttcacgtttagctgaagttacttatcaactttcataccacaacatctctgcaagtattcaagagttgtggcataatacgcttcgc

SEQ ID NO: 16341 - RNA, 142 nt, unidentified
  source 1..142: mol_type = other RNA; note = Related to NZ_LR824569.1; note = Chryseobacterium sp.
gcaagcaatttcttgtttaaacgctacggaatataagcaggattacctgaacagttgttcaagtttagctgaagatacttatcaactttctcaccacaacatcattccaagtattcatgagttatggtgggatacgcttcgc

SEQ ID NO: 16342 - RNA, 142 nt, unidentified
  source 1..142: mol_type = other RNA; note = Related to PASE01000008.1; note = Muricauda sp.
gcaagcagtatcttgtttaatatcaagtattagtaaacaggatcccttgagcagttgttcaagcttagctgaagcatcttatcaactttcactacacaacatctctgcagggattcaagacttgtgtagtaaatgctggcgc

SEQ ID NO: 16343 - RNA, 179 nt, unidentified
  source 1..179: mol_type = other RNA; note = Related to NZ_FSRA01000001.1; note = Chitinophaga niabensis
acaagcattatcttgtttaattgtgtcgaaagacattaaatatttcgcagaaatgcataaatatttgtacaaaggcaagataacatgagcagttgcacatgtatggctgaagtaacttttcaacctttaatgcacaacatgtctccaagtattcaaaagttgtgcattaaacgcttcgc

SEQ ID NO: 16344 - RNA, 185 nt, unidentified
  source 1..185: mol_type = other RNA; note = Related to JACCBZ010000002.1; note = Mucilaginibacter sp.
gcaagctatatcttgtttaattacgcaaatagcgtttattttcgagttggccagcaatgtccaatcttgatgttacgaaagcaagataacctgaacagttgttcaagtgtggctgaagcaacttttcaacttttaacacacaacatgtctgcaagtgttcgccacttgtgtgttaaatgcttcgc

SEQ ID NO: 16345 - RNA, 167 nt, unidentified
  source 1..167: mol_type = other RNA; note = Related to VFPL01000001.1; note = Arcticibacter tournemirensis
gcaagcaacatccggcctaacttggcacttactgcctttgttttctgaaaggaaaatgcaaaggtcggatatcccatcagtagatggggaaatggttgaagatacttttcaacccttgatacacaacatcactgcaggtattcgcgagttgtgtaccaaagcttcgc

SEQ ID NO: 16346 - RNA, 121 nt, Bacillus sp.
  source 1..121: mol_type = other RNA; note = Related to CP095875.1
actagattcactacattgggagtgtagagactaaggcatttgtcttagtggcataaagcaactttataacaagcctgcaccaccacttgcttcactgcgggttgcacaggctgtttcaagc

SEQ ID NO: 16347 - RNA, 132 nt, unidentified
  source 1..132: mol_type = other RNA; note = Related to VFNO01000006.1; note = Brevibacillus sp.
gttagccgtggcctttgttatggcgactaagttgagtcaacttagtaattgtaaagcaactttcattgcgtcttctctacaaccattgacagaaagtatctcgaagaagtaggttgcagagaaggcgcacac

SEQ ID NO: 16348 - RNA, 140 nt, unidentified
  source 1..140: mol_type = other RNA; note = Related to NQMO01000005.1; note = Paenibacillus sp.
gctagcatcggcctaataaaccaggcgactaggttgagtatacctagtaaggataatgtttctattatagcaacttctctacaaccacgagatacaggaagtaattcggagaagatggttgcagagaaggtgcacaccgc

SEQ ID NO: 16349 - RNA, 143 nt, Bacillus sp.
  source 1..143: mol_type = other RNA; note = Related to CP026036.1; note = Bacillus subtilis
gttagcaatgccacaattaacgggtaccgccgcagttgtgggaccaagactggttaggcttggttgtgatgaagtgacttttaaacgactaattgcataacactacccaaaggcggggtaggctatgcaatccctcgctctgc

SEQ ID NO: 16350 - RNA, 140 nt, Bacillus sp.
  source 1..140: mol_type = other RNA; note = Related to CP043830.1
gttagagtttttcacgatcaaacggttttatctgttagagagtgaggccaagactatttggcttggctactgataaagttactttataacgacctggtacataacactccccttggtcggttatgcactatctcgctcgc

SEQ ID NO: 16351 - RNA, 109 nt, unidentified
  source 1..109: mol_type = other RNA; note = Related to NZ_VATY01000001.1; note = Maribacter algarum
gttagcaattaaccctaataaggttttctcagtgtagttcattgagaattattgaagccacttgatagcataacttatatgttattaataatatgcttaaagactaaac

SEQ ID NO: 16352 - RNA, 109 nt, unidentified
  source 1..109: mol_type = other RNA; note = Related to NZ_CP058986.1; note = Polaribacter sp.
gttagcaaataaccctagtacggttttctcagtgtagttcattgagaattagtaaagctacttgataatataatctatatgttatcaataatatgattaaagactaaac

SEQ ID NO: 16353 - RNA, 94 nt, Flavobacterium sp.
  source 1..94: mol_type = other RNA; note = Related to NZ_MUGY01000012.1; note = Flavobacterium hydatis
gttagcaaataacccgtaataaggttttctcggtgtagttcatcgagaactaataaagctacttaatagcagactcagcaatacttttgctcac

SEQ ID NO: 16354 - RNA, 86 nt, unidentified
  source 1..86: mol_type = other RNA; note = Related to DTTW01000005.1; note = Flavobacteriaceae bacterium
gttagctaaatctctcataagagggattctcaggatagtttcttgagaagtactaaagctacttaacagaaatttatttgctatgt

SEQ ID NO: 16355 - RNA, 128 nt, unidentified
  source 1..128: mol_type = other RNA; note = Related to BMFQ01000008.1; note = Bizionia arctica
tttagctttaatttttactagtagtaatagtagtaaaaagctaggactagttgtctatagttgtattaatgttagcttatatcgtttaagtagtgaaacgctaaaggttccactactcaaagcaaagc

SEQ ID NO: 16356 - RNA, 121 nt, unidentified
  source 1..121: mol_type = other RNA; note = Related to SJXJ01000003.1; note = Tenacibaculum sp.
tttagctgtatttttactagaaatggtaaaaagctaggactagttgtctatagttgtattaatgttagcttatatcgtttaaatagtgcaacgctaaaggttacactattcaaagcagagc

SEQ ID NO: 16357 - RNA, 119 nt, Flavobacterium sp.
  source 1..119: mol_type = other RNA; note = Related to MUFX01000009.1
tttagctatttttttactttatgtaaaagctgtagactagttgtctatagatgtttttaatgttagcttatatcgtttaaatagtgaaacactaaaggttccactactcaaagcagagc

SEQ ID NO: 16358 - RNA, 132 nt, unidentified
  source 1..132: mol_type = other RNA; note = Related to QSQY01000003.1; note = Parabacteroides sp.
tttagcttatacttttacttcttgtaaaaggctggaactagttgtctccggcagtaataatgttagtttacatcgtttaagtagtgaaactcggtctcgcaagctcgcaggcttcactactcaaagcatagc

SEQ ID NO: 16359 - RNA, 120 nt, unidentified
  source 1..120: mol_type = other RNA; note = Related to JAEUTP010000018.1; note = Bacteroidia bacterium
attagcaattgtttcaattttattgagacaccatgcacagtgggcatggttgctgtaaagctactctacatcattttgatgtacaacacccttcggggctgtacatcagaacgcgcgcgt

SEQ ID NO: 16360 - RNA, 125 nt, unidentified
  source 1..125: mol_type = other RNA; note = Related to NZ_LBIQ01000028.1; note = Mangrovimonas sp.
attagccattatcaattttttgaaattgattctgttctgtatacgaatggaggctctaaagtaactttacatcatcttgtatgcaagtcggtacagttgtcagcttgcatacaacaacgcgcagc

SEQ ID NO: 16361 - RNA, 118 nt, unidentified
  source 1..118: mol_type = other RNA; note = Related to SUYI01000044.1; note = Prevotella sp.
tctagctttgagtgaagatgaaatattctttgccggtatgtctcgtggacatactgaaattaaaacaccattatactgataatgctgaacaaggattgtccagcattgtcactaacgt

SEQ ID NO: 16362 - RNA, 118 nt, unidentified
  source 1..118: mol_type = other RNA; note = Related to JAGCCF010000043.1; note = Paludibacteraceae bacterium
tctagctttatgtgaagatgaaacattctttgccggtatgtctcgtgggcatactgaaattaaaacaccattatactgataatgctgaacaaggattgtccagcattgtcactgacgt

SEQ ID NO: 16363 - RNA, 117 nt, unidentified
  source 1..117: mol_type = other RNA; note = Related to NZ_RBXN01000012.1; note = Coprobacter fastidiosus
tttagctttaagtaaagatgtaatactctttgcctgtatgtcccgggggcgtacagaaattaaaacacaattacactgatagtgctgaacaaggcttgtccagcactgtcactaaag

SEQ ID NO: 16364 - RNA, 123 nt, unidentified
  source 1..123: mol_type = other RNA; note = Related to MKTD01000020.1; note = Bacteroidia bacterium 43-41
attagctatcagtatagaaatatacgggttggtcttttggacttacttttattaaaacaactttatactgaataactgaaacgcgcctccgcaggctacagcggttccagttgttcacttcgt

SEQ ID NO: 16365 - RNA, 111 nt, unidentified
  source 1..111: mol_type = other RNA; note = Related to VZAS01000054.1; note = Prevotella copri
attagctgaatatgggattagcatattcgtatgtcttttggacatgctagattttaaatgtcattatactaagtatatcgaacaataaatgttcgatatgctcacttgcgt

SEQ ID NO: 16366 - RNA, 139 nt, unidentified
  source 1..139: mol_type = other RNA; note = Related to JAGBLT010001022.1; note = Bacteroidaceae bacterium
attagcttatggttatccgttgtttcataacaaagatgacaggtcggttcccttggagcccactgaacagtaaaacacctttatactgtaacgatgaaatacgcttcgctttgctcgcgattccatcgctacactctgc

SEQ ID NO: 16367 - RNA, 170 nt, Bacillus sp.
  source 1..170: mol_type = other RNA; note = Related to NPDG01000102.1
aatagtctctagaaaggtagagagtctctatcagatttaatgttacttaattgattggatgaaaagaagaaaaccacttcttttcacccatgcaaattatcatttgcatgagcctaatgattaaataaaaagcaatttaatcataggcttaattttcataagtgattatt

SEQ ID NO: 16368 - RNA, 201 nt, unidentified
  source 1..201: mol_type = other RNA; note = Related to JALMMK010000003.1; note = Clostridioides difficile
aataatctctagcaactaatagcgagtcgctatttaatatagaatgtttcttgatagatacagtactaaagcaagcgagttgtttagtactgtgttgaattaaataaaaagcgatttaattcaacacatttagtgaaccaaataaaaaacgatttaattcactaaatgtattttcaaaatacatgatttagctagtatatt

SEQ ID NO: 16369 - RNA, 152 nt, unidentified
  source 1..152: mol_type = other RNA; note = Related to NZ_NOJY02000076.1; note = Romboutsia sp.
aataatctctagcaattaatagcgagtcgctatttaagatgaaatgtttctttatagatacaggactaatataagatcgttattagtcctgcgttgaattaaataaaaagcaatttaattcaacagttttatcggattaaataaaaaccaat

SEQ ID NO: 16370 - RNA, 216 nt, unidentified
  source 1..216: mol_type = other RNA; note = Related to NZ_CP017603.1; note = Clostridium formicaceticum
aaagccctctagaatttgaacagcgaatcgctgttcgttatttaaagtttctaaatatctcatggaactaaaatcttcttgagagtaaggtttcgagggtcgaattttagttccatgtatattgcggaaaatcatcgcaatatacagcctaaaaaggtttaaactgcaaaacctttttaggctgagtttgcaattatagttttcgtagagggcttt

SEQ ID NO: 16371 - RNA, 185 nt, unidentified
  source 1..185: mol_type = other RNA; note = Related to JABXYS010000002.1; note = Peptostreptococcaceae bacterium oral taxon 081
tgcatggaatagaaatcgaatgacaagttgtcattcttaataaaaatgtatctttgtatcataggatgattatttaaagaaataatcatcctatgaaaccattggaattacaatggtttcgtctatctttattgcaagcaataaagatagagtatgtttcaataacagaattagtatttcatgca

SEQ ID NO: 16372 - RNA, 173 nt, unidentified
  source 1..173: mol_type = other RNA; note = Related to NZ_JAHLDH010000001.1; note = Clostridium algidicarnis
atgtattaatagaaagcgaagaacaagttgttcttcatagttacaatatttctttgttttatagtagattaaagtcaaagactttaatctactgtaaacagttgcaactgcaactgtttacatcaacaccaaggtgttgatatattttaataacagaataggtattggtacat

SEQ ID NO: 16373 - RNA, 174 nt, unidentified
  source 1..174: mol_type = other RNA; note = Related to JAFUNX010000099.1; note = Clostridia bacterium
tatagtcattagaatatgaggagcaagttgcttctcgaaaacaaaacgtttcttctttgtcacatgtgaattcgaagaattcacatgcgcaaaagacggaatagcctatttgcacatgtgatgcttattctaagcatcacatgcaagaatgaatcagacagagtagtgactata

SEQ ID NO: 16374 - RNA, 182 nt, unidentified
  source 1..182: mol_type = other RNA; note = Related to CP042469.1; note = Clostridiales bacterium
tgtatcgattagaaagcgagaaacaagttgtttctcatagttaaaatgtcacttactgaatgaggataaaatcaaagattttatcctcgtccacaaaattaaaatcttgtggacgagcatatctgttggaaaatctcaacagatatgctcactagtacaaataaagaaacggtagtcgtgca

SEQ ID NO: 16375 - RNA, 183 nt, unidentified
  source 1..183: mol_type = other RNA; note = Related to NZ_CP065321.1; note = Acutalibacter muris
tgtgtctgttagaatgcgagaagcgagtcgcttctctaagtgccaacggtgcttactttatcaatgtgtatgttcccagtaacatacacattgcaaagcgcttggaataaagcgctttgcaatggtattgcggtatgccgcaataccactgcttgttcagaaacagaatgggtaataggtacg

SEQ ID NO: 16376 - RNA, 202 nt, unidentified
  source 1..202: mol_type = other RNA; note = Related to JABMAY010000023.1; note = Dialister sp.
tgtacgcattagaatgcggaacgcgagtcgtgttccaaagtagcaatggttcttatttcatcatgacaacaattcgcccggaattgttgtcatggcaaattgcttggaataaagcaatttgtcatgtcatacacgacaatttggagcggtccaaattgtcgtgatgccatgatttccaaattcagtacaggtaatgcgtaca

SEQ ID NO: 16377 - RNA, 174 nt, unidentified
  source 1..174: mol_type = other RNA; note = Related to JAHRFW010000235.1; note = Erysipelothrix sp.
cacacctattagaaggcgaaagatcagtggtctttcatagctagaatgtcacttattacgattgtcaattatcgaagattaattgacaatagcattctgattaacagaatgcagtaatgtttggaaatactcaaacattacttgattataaaaatagatttggtagtaggtgtg

SEQ ID NO: 16378 - RNA, 206 nt, unidentified
  source 1..206: mol_type = other RNA; note = Related to PGZS01000061.1; note = Firmicutes bacterium HGW-Firmicutes-3
cgcatccgttagatggcgaaaggacagtggactttcataggatgtaggtttcttaatgtgcagataaagaaagccaagctttctttatctgtatatgttggcataacaacatatacagaatatattggttctcctcgcggaagcggttccgctcgtcaaaccaatatatactgcttaagcaaataaagattttggtagcggatgcg

SEQ ID NO: 16379 - RNA, 189 nt, unidentified
  source 1..189: mol_type = other RNA; note = Related to JAJFDX010000002.1; note = Proposed Lachnoclostridium pacaense
tgcatctgttagaaagcgaaaggacagtggcctttcatagttgcaaggtttcttaatatgcagattaagtagcaaagcatacttaatctgaatatgttggcattacaacgatattcagcaaatgttgttgcatgcgaatgcaacaacatttactgctttagcacaaatacagaaatagtagcaggtgca

SEQ ID NO: 16380 - RNA, 179 nt, unidentified
  source 1..179: mol_type = other RNA; note = Related to QUMM01000064.1; note = Lachnospiraceae bacterium OF09-6
tgcatctgctagaaatcgaaaggacagtggactttcataggaataaagctgcttaatatattaggatgaaacatgtacaacatgtttatcctaatatgttggcattgcaacatatattcgctacaatctataatgattgtagcgacggattttcaaatacagaatgggtaacaggtgca

SEQ ID NO: 16381 - RNA, 205 nt, unidentified
  source 1..205: mol_type = other RNA; note = Related to QVIB01000063.1; note = Dorea longicatena
tatattggctagaaatagaaaatcaagttgattttcataattgtaaagtgtcttacatttattatcagtaaaagactaacgttcttttactgatagtaaagtgatttcgcaacgggggttgctcaatcactttactatctttataattcattgcttgacaatgatttataaagataattttcagttaggttaggtagcttgtata

SEQ ID NO: 16382 - RNA, 207 nt, unidentified
  source 1..207: mol_type = other RNA; note = Related to JAGZKG010000016.1; note = Roseburia hominis
tatatttgttagaaaaagaaaatcaagttgattttcaaagcgaaaatgtttcatacgtttattatcaggaaaagggtaatgctcttttcctgatagtaacgttatgctcgcaggagcaactgctctcataacgttactatcattacaactgattggttgacaatcagttgtaatgagaattttcaattagatggggtagcaaatata

SEQ ID NO: 16383 - RNA, 157 nt, unidentified
  source 1..157: mol_type = other RNA; note = Related to NZ_CAKODJ010000004.1; note = Adlercreutzia muris
gccagtgtctagaaggcgggaggcaagttgtctctcatagtggcaatgcgcttttcagagaccaggcttttgagcagagcccaaaagcctgcgcgcgaagtggcgcgccagaagcgaagcttcaggtctttcaaaaacagataaggtagacactggc

SEQ ID NO: 16384 - RNA, 257 nt, unidentified
  source 1..257: mol_type = other RNA; note = Related to JAFXDF010000036.1; note = Clostridia bacterium
agcagtgtctagaaaatgagcgactagttgttgctctatgattcaacggcacttgaagccatatgtgtgtggcggcagtgggcggcctaaaggctcgcgaccacttgcctagccgcacacatatcatatggcttcgccagacgataccaataatgacatacgattatcgagataatcgtatgtcaggcgtaccgcctgctatataccgtgctggcgcacggtatatagcataactatcagtttaggtagatgctgct

SEQ ID NO: 16385 - RNA, 257 nt, unidentified
  source 1..257: mol_type = other RNA; note = Related to JAFVRR010000006.1; note = Clostridia bacterium
atcaacacctagaaatcgaaaaacgagtagtttttcttattaacaaaggtactttgttcacaaacgcaagcgtttgttatgttatttcctcaaggaatacattcctatcgtaaataacatatcaaatagtggcggtgggcacaaattttgcgttggtaaaccaatcgcaaaatatttgtgcttccacgcttgctcaccatttgaagttatggcattgccaaaccaatataaaatttaaagataaagtaggtgttgat

SEQ ID NO: 16386 - RNA, 183 nt, unidentified
  source 1..183: mol_type = other RNA; note = Related to NZ_CP075175.1; note = Paenibacillus sp.
gagatcttctagattagaataacgagtcgttattcgatgatagtaaggggactttttgctcggggaagaaaatctccgccgctccgcttgctacaatcttctcccccgaacaataagaaaagcacttattgttctttctaattaaagtgtgtgtgctaggccataaaatgggtagaaggtctc

SEQ ID NO: 16387 - RNA, 202 nt, unidentified
  source 1..202: mol_type = other RNA; note = Related to NZ_CAJGBF010000001.1; note = Rossellomorea arthrocnemi
tatgttttctagaattgaatagcgagtcgctattcgtgatgtaaagttactatgtagctgtatcagtactaattttgaagagcgaaaattagtactgaaccaacaaagaagagcgctttgtcggttcaccataacaaaatccctgaggtcaaggatttcgtgatggtgatcagttaaattaaataatccagtagaaaacata

SEQ ID NO: 16388 - RNA, 202 nt, unidentified
  source 1..202: mol_type = other RNA; note = Related to NZ_VTEU01000001.1; note = Sutcliffiella horikoshii
tatgttttctagaattgaatagcgagtcgctattcgtgatgtaaagttactatgtagctgtatcagtcctaattttgaagtgcgaaaatttggactgaaccaacaaagaagaccgctttgtcggttcaccataacaaaatccctgaggtcaaggattttgttatggtgatcagttaaattaaataatccagtagaaaacata

SEQ ID NO: 16389 - RNA, 196 nt, unidentified
  source 1..196: mol_type = other RNA; note = Related to NZ_JACSLM010000003.1; note = Exiguobacterium sp.
tatgttttctagaattgaacagcgagtcgctgttcgtgaattaacgttacttagtagctgtcactgcacaatttttcctgaaaaattgtgctgtaacaacaaagaagttcactttgttgttcatcaccgtgaattatcgaggtcgagaattcacggtgatggatcagttaattaaacaaatctagtagaaaacatg

SEQ ID NO: 16390 - RNA, 203 nt, unidentified
  source 1..203: mol_type = other RNA; note = Related to JADCLJ010000021.1; note = Cytobacillus luteolus
agtgtcttctagaattgaatagcgagtcgctattcgtgaagttaagttactatgtagctgtctcagtactaattttgaaaagcgtaaaattagtactgaaacaacaaagaagagcgctttgttgtttcaccataataaaatcttagaggtcaaagattttattatggtgatcagttaaattaaataatccagtagaagatatt

SEQ ID NO: 16391 - RNA, 200 nt, unidentified
  source 1..200: mol_type = other RNA; note = Related to VENA01000064.1; note = Firmicutes bacterium
catgttttctagaattggatagcgagtcgctattcgtgaagtaaagttactatgttgctttttcagtactaattttagaagcgtaaattagtactgaaacaaccaacagaagcatttggttgttcacctaaataaaatattagaggtcaaagattttatttaggtgatcagttaagtaaagaaatctagtagaaaacaat

SEQ ID NO: 16392 - RNA, 175 nt, unidentified
  source 1..175: mol_type = other RNA; note = Related to LFJO01000006.1; note = Alkalihalobacillus pseudalcaliphilus
gttgttttctagaattgagcagcgagtcgctgttcgtgaagtaaagttactatgtatctatgatactaattttcaagagcgtaaaattagtatcatacaacaaagaaaatcactttgttgtatacaccagtaaacgtggtgtataggtaaattaaataatccagtagaaaataac

SEQ ID NO: 16393 - RNA, 177 nt, unidentified
  source 1..177: mol_type = other RNA; note = Related to SMZU01000020.1; note = Rhodococcus qingshengii
tgtattttctagaattgagtaacgagtcgttactcgtgaagcaaggttactttgtggcaaatgaccttgtttagaagagcactaaacaaggtcatcccccaaagaagatcgttttgggggatgaggaaaaagaaaccttcctcagtagttaattggaaagaaccagtagaaaatatt

SEQ ID NO: 16394 - RNA, 178 nt, unidentified
  source 1..178: mol_type = other RNA; note = Related to NZ_CP045040.1; note = Carnobacterium maltaromaticum
aaaatttgttagagtgtctgaaaagcgagtcgcttttctaagaacttaagttcctaaatagcaaaacatgcttgaacaaagtgcgtccaagcatgcttcgctaaagctccgacagtaatttgattatttccgaaggtctcaataataaattactgttttgaaaaatttaagaaatatt

SEQ ID NO: 16395 - RNA, 178 nt, unidentified
  source 1..178: mol_type = other RNA; note = Related to KQ130593.1; note = Listeria newyorkensis
taactttgttagagtgtctgaggagcgagtcgctcctctaagaattaaaatttctaagtagcaaaacaagcttgcgccaaggcccaagcttgctcgctctgctccgcagtagttagattatttccgaaggtctcaataactaaactactgttttgaaaaattaatgaactattagtta

SEQ ID NO: 16396 - RNA, 179 nt, Bacillus sp.
  source 1..179: mol_type = other RNA; note = Related to NZ_CP084677.1; note = Bacillus safensis
tgtaagaaaggcgagtcgcctttcgaataagcaacgttacaaaattctgaattagcaaacaaatcgagatttgtttgctaatttgaaacggaaagcgcgtttcaaattacctaacttataagttgaggttcaaacttctcaagttaggtaattaaataatgaaagattcaatgggttca

SEQ ID NO: 16397 - RNA, 167 nt, unidentified
  source 1..167: mol_type = other RNA; note = Related to JABBEA010000018.1; note = Paenibacillus sp.
agctgtgactagacttttagcaagtgctaatcgaagtaagtatctattttatttcttacttcaaaccataatgataattctgcaaaaaccgcagaatcatcatcacctttaaattaagaactaaaatctagcagtctccttaatttaaaggtgaggtagtcactaaa

SEQ ID NO: 16398 - RNA, 153 nt, unidentified
  source 1..153: mol_type = other RNA; note = Related to NZ_AVBF01000002.1; note = Pontibacillus yanchengensis
atgggtgactagacttttagcaagtgctaatcgaagtaagtatgtattgaattcttatttcaaaagagaaatggtaattctgtagaaaccaacagaatcaccatacccctttaaattaacaattcataatttaaaggggaggtagtcacctaa

SEQ ID NO: 16399 - RNA, 168 nt, Bacillus sp.
  source 1..168: mol_type = other RNA; note = Related to JH792149.1; note = Bacillus cereus
agtggtgactagacttttagcaagtgctaatcgaagtaagtatgtatttaattcttatttcaaaaccataatgatgattctgcccaaaattgcagaaccatcctcacctttaaattaagaattaaaaccctaagagcttcttaatttaaaggtgaagtagtcactaaa

SEQ ID NO: 16400 - RNA, 166 nt, unidentified
  source 1..166: mol_type = other RNA; note = Related to NZ_FODJ01000007.1; note = Amphibacillus marinus
gatggtgactagacttttagcaagtgctaatcgaagtaagtgtgtacttaattcttacttcaatatcaatgataattctgcaaaaagcgcagaatcatcattcacctttaaattaagaattaaaaccttaagagcttcttaatttgaaggtgaagtagtcactatt

SEQ ID NO: 16401 - RNA, 165 nt, Bacillus sp.
  source 1..165: mol_type = other RNA; note = Related to CP035226.1; note = Bacillus subtilis
gttggtgactagacttttagcaagtgctaatcgaagtaagtatgtatttaattcttatttcaaaatcaatgataattctgcaaaaaccgcagaatcatcatcacctttaaattaagaattaaaaccttaagagcttcttaatttaaaggtgaagtagtcactaaa

SEQ ID NO: 16402 - RNA, 168 nt, unidentified
  source 1..168: mol_type = other RNA; note = Related to JACHHE010000004.1; note = Planococcus koreensis
aatagtgactagacttttagcaagtgctaatcgaagtaagtatgtacttaattcttacttcaaaaccctaatgataattctgcaaaaagacgcagaatcatcatcacctttaaattaagaattaaaacactaaaagcttcttaatttaaaggtgaagtagtcactaaa

SEQ ID NO: 16403 - RNA, 171 nt, Bacillus sp.
  source 1..171: mol_type = other RNA; note = Related to NVGO01000019.1; note = Bacillus toyonensis
tatagtgactagacttttagcaagtgctaatcgaagtgagtatgtattaagtcttacttcaaaacataagtacaattctgctccgcttctcttcgcaggatcgtactcacctttaaattaagacttaaaacctaaaaaacgtcttaatttaaaggtgaagtagtcactata

SEQ ID NO: 16404 - RNA, 135 nt, unidentified
  source 1..135: mol_type = other RNA; note = Related to BJZH01000076.1; note = Companilactobacillus nantensis
gagggtagttagcaatctatagcaatgtgctatagtaggtagtttctatcttaatcagtgatgtcatcaaactgaaagcgagtttgatgacggctctgtttaagaaggacgcttaaacagaccgtaactaccctt

SEQ ID NO: 16405 - RNA, 150 nt, unidentified
  source 1..150: mol_type = other RNA; note = Related to SVLF01000041.1; note = Oscillospiraceae bacterium
gaaacgcattagcctgaggtgtattcgcctcatatacagaacggcactaactctcatacagaccagcgaaacctgccttccttcgcgcgttgttttcgctgttctgtatgcgacaagaataagtaaaataagtttttcgtaatgcgtttc

SEQ ID NO: 16406 - RNA, 150 nt, unidentified
  source 1..150: mol_type = other RNA; note = Related to JAFSGO010000067.1; note = Clostridia bacterium
ggagaccgttagctaagaggtgtattcgcctcgtgttaagaacggcactaacagatgttgctgagcgcttacgcgttctcttcgttctctttgtaaccgctctgcaacatcgaatgtttgaatttagtttcattttacgtagcggtctcc

SEQ ID NO: 16407 - RNA, 132 nt, unidentified
  source 1..132: mol_type = other RNA; note = Related to NZ_JHXF01000028.1; note = Ruminococcus flavefaciens
gacattcaatagcatgggagcgattcgccccaataaagaaaggcacttactttatctaacaaatccgtcactacgttccgtatttgttagataagcgtcgcaaacgacgctttgattttcgtattgaatgtc

SEQ ID NO: 16408 - RNA, 153 nt, unidentified
  source 1..153: mol_type = other RNA; note = Related to NZ_CP094682.1; note = Anaerotruncus colihominis
gggaacgatcagaccggggtgaattcgccccttgatcaaacggcactaaccactgtttgccgtgcgtgcgtcttgttcatttcattctctgcgacgcacgcacggcaaacagacagatccattattattacaatttatttagtgatcgttccc

SEQ ID NO: 16409 - RNA, 145 nt, unidentified
  source 1..145: mol_type = other RNA; note = Related to CABHNM010000079.1; note = Dorea longicatena
aagagtaattgaattgaggtgtagtcgcctccttgatgaaggtggctaacatccgagcggaacaggttgctcgctcattgcattcgttcgtaacctgccccgctcgaatgattttggtcgcttttatgatactacaattactctt

SEQ ID NO: 16410 - RNA, 152 nt, unidentified
  source 1..152: mol_type = other RNA; note = Related to JAFVDW010000052.1; note = Lachnospiraceae bacterium
aagagtaactggattgaggtgtagtcgcctccttgagcaaaggcactaacatcgcaatagaatcaacttgttcgccgcatagggcttcggcgaacaagtcgtttctattgcgttgcgtggtgaaagcattgatttattaagcagttactctt

SEQ ID NO: 16411 - RNA, 122 nt, unidentified
  source 1..122: mol_type = other RNA; note = Related to NC_015275.1; note = Cellulosilyticum lentocellum
aagagcaactagattgaggcgattcgcctccttggaaaagggtactaagtttctgtcgcacaccaatttataagcttataaattggtgtgcgacagaaatgaaataaatagtagttgctctt

SEQ ID NO: 16412 - RNA, 144 nt, unidentified
  source 1..144: mol_type = other RNA; note = Related to QULM01000001.1; note = Coprococcus sp.
agggataactagattggggtgcattcgcctccttgcaaaacgtaactaactctttaatttacaaagccactttgcgtgaaaagcatacgcaaagtggcttgcaaatcaaagatttgcaagttccaatttcaagtagttgtccct

SEQ ID NO: 16413 - RNA, 128 nt, unidentified
  source 1..128: mol_type = other RNA; note = Related to AP018794.1; note = Lachnospiraceae bacterium KM106-2
ataagcagctagaagtgagagcgagtcgcctctataaagaacggtactaactctctaaattttacggcctttacctgcggtaaagcccgatagatctagagaagttaccatgacaggtagctgctttt

SEQ ID NO: 16414 - RNA, 154 nt, Vibrio sp.
  source 1..154: mol_type = other RNA; note = Related to JAJSDZ010000009.1
cctttagcgagttgttttttgagaaatccaaaatacaactgggtagtgattcgctgtccttcaactaaaccggaacattggctcatttagttcttgctcgctgaaacttcgtttcagactcgcaaggtctaaacgagaacttttgacgtaaagg

SEQ ID NO: 16415 - RNA, 155 nt, Vibrio parahaemolyticus
  source 1..155: mol_type = other RNA; note = Related to MIQX01000067.1
cctttagcgagttgattttcgaaaaagtcgggaatacaactgggtagtgattcgctgtccttcaggaaaacagatatattagctcatttagttcttgctcgctaaaacttcgttttagactcgcaagttctaaatgtgaacttttgacgtaaagg

SEQ ID NO: 16416 - RNA, 157 nt, unidentified
  source 1..157: mol_type = other RNA; note = Related to CP076406.1; note = Providencia rettgeri
cctttagcgagttggtttttgagaaatcaggaattcaactgggtagtgattcgctgtccttcaattaaactggttaaatggctcatttagctcttgctcactaaaacaccccggttttagattcgcaagttctaaatgagaacttatgacgtaaagg

SEQ ID NO: 16417 - RNA, 154 nt, unidentified
  source 1..154: mol_type = other RNA; note = Related to NZ_WTLA01000004.1; note = Pseudoalteromonas sp.
cctttagcgagttgttttctgataaatcagaaatacggctgggtagtgattcgctgtccatcagttaagccattaaattgacgtatttagttcttgctcgctaaaactacgttttagactcgcaagttctaaattcgatattatgacgtaaagg

SEQ ID NO: 16418 - RNA, 155 nt, unidentified
  source 1..155: mol_type = other RNA; note = Related to CP034073.1; note = Shewanella psychromarinicola
cctttagcgagttgttttttgaaactatcaataaagcaactgggtagtgattcgctatccttcaacaaaaccagatgaatagctcatttagttcttgctcgcaaaaactccgtttttgactcgcaagttctaaatgcgaacttgtgacgtaaagg

SEQ ID NO: 16419 - RNA, 155 nt, unidentified
  source 1..155: mol_type = other RNA; note = Related to JAESPX010000111.1; note = Colwellia sp.
cctttagcgagttgtatttcgaaaaattaggaatatcaactgggtagttgtttcgctgtccttcaattaaactggtttattaactaattaagttcttacccagaaaaacttcgtttttcagtgcaaggtcttaattagatcttatgacgtaaagg

SEQ ID NO: 16420 - RNA, 143 nt, Enterobacter sp.
  source 1..143: mol_type = other RNA; note = Related to FKGF01000007.1; note = Enterobacter kobei
cctttagcgagtgaattttcactgaacagtgcttcgctgttccgcaacaaaactggtgtaatgccggctcttaatgttcggagccgcacgctcctcgcgtgctgatccgaacattaatctcctatgatcttttggcgtaaagg

SEQ ID NO: 16421 - RNA, 145 nt, Acinetobacter sp.
  source 1..145: mol_type = other RNA; note = Related to DADBIP010000003.1; note = Acinetobacter baumannii
cccttagcgagtgagcgtaatactcactggatagtgattcgctatcctgcaattaatcttttacaatgctttatttaaagctacccagcaataaacgccccgtttattgccatgtacctttaaataacttcttatgacgtaaggg

SEQ ID NO: 16422 - RNA, 143 nt, unidentified
  source 1..143: mol_type = other RNA; note = Related to CU207211.1; note = Herminiimonas arsenicoxydans
cctttagctagtgaatgaaaattcactggatagtgtttcgctatcctgcattaaatccaagtcaatgccgtatttaattgttcctctcaaccatcgcccgatgtttggtcggaacacttaaatcgattctttagccgtaaagg

SEQ ID NO: 16423 - RNA, 143 nt, unidentified
  source 1..143: mol_type = other RNA; note = Related to SNWT01000002.1; note = Idiomarina sp.
cttttagcaaacagacgtcagtctgttggacggcgcttcgccgccctagtaataatctagtgtctgctgttttaaaatctgtacctcaagtatctctcgatacttgatctacaccttttaacacatttctttagacgtaaaag

SEQ ID NO: 16424 - RNA, 144 nt, Aeromonas sp.
  source 1..144: mol_type = other RNA; note = Related to NZ_CP047155.1; note = Aeromonas veronii
cccttagcgagtgaaccttggttcattggatagcgtttcgctgtcctgcacacaatctgagctattgctgcatttaactgtgcagagccagaaacatccgtttcttgatctgcacagttaaacttgatacttaagacgtaaggg

SEQ ID NO: 16425 - RNA, 142 nt, unidentified
  source 1..142: mol_type = other RNA; note = Related to JAHKPR010000010.1; note = Colwellia sp.
tccttagcgagtgaggtcaaactcactgggtagtgtttcgctatcctgcacataaactagaacaatgccgcatataaatatgcagaacaagcgactcgtcgcttgagctgcatttttatatccagaacttaagacgtaagga

SEQ ID NO: 16426 - RNA, 149 nt, Vibrio parahaemolyticus
  source 1..149: mol_type = other RNA; note = Related to CP006004.1
cccttagcacatagtgtactttttgttcactggatagcgtttcgctgtcctgtactaaatccagttcaatatcgtatttcactgtgccgagcaagaagacattcgtttcttgaacggcacagtgaaattcgtaaatttagacgtaaggg

SEQ ID NO: 16427 - RNA, 148 nt, Vibrio sp.
  source 1..148: mol_type = other RNA; note = Related to NZ_AP018689.1; note = Vibrio aphrogenes
cccttagcgaatgagcttacttagttcattggatagcgtttcgctatcctgcatacaatctgattcaatgccgcatgaaaatgtgcagagccagaatacagtagtttctggaactgcacattttcatccgcgacttaagacgtaaggg

SEQ ID NO: 16428 - RNA, 146 nt, Proteus sp.
  source 1..146: mol_type = other RNA; note = Related to NZ_CP034105.1
cccttagcgaatgaacataatgttcattggatagcgtttcgctatcctgcacataatctgattttatgccgtatgaaaatgtgcatcaccagaataccgtagtttctggatctgcacattttcctccgcgtcttgaggcgtaaggg

SEQ ID NO: 16429 - RNA, 146 nt, unidentified
  source 1..146: mol_type = other RNA; note = Related to NZ_BAEK01000003.1; note = Paraglaciecola agarilytica
tctttagcgagtgggtgaatagccctctggatagtgtttcgctatcctgcgaacaatcttgcaccatgccgaatgtaatggtgcctagaaagaaaaagtcttttcttgtccaggcaccattacatccgtttcttaagtcgtaaagg

SEQ ID NO: 16430 - RNA, 145 nt, Nitrosomonas sp.
  source 1..145: mol_type = other RNA; note = Related to FOFX01000033.1
cctttagcgagtgggtgctaaactcactgggtagagtttcgctatccgacactaaatctagaatcatgccgtatatatacttgcttcacaatcatctcccgatgattgatcagcaagtttatatccgatacttatgacgtaaagg

SEQ ID NO: 16431 - RNA, 145 nt, unidentified
  source 1..145: mol_type = other RNA; note = Related to BMLH01000001.1; note = Rheinheimera tangshanensis
cctttagcgagtgggtcaagtactcactgggtagtgtttcgctatcctgcactaaatccagaagcatgccgtatataaatatgctgcacaatcatcgctcgatgattgcaccgcatttttatatccgattctttagacgtaaagg

SEQ ID NO: 16432 - RNA, 145 nt, unidentified
  source 1..145: mol_type = other RNA; note = Related to NZ_VBVC01000001.1; note = Halomonas sp.
cctttagcgagtgggcttagcgctcactgggttgcgcttcgcttccctgcacgaaatctggagctttagcgtatctaaagctgcggcacaatcatctctcgatgattgcaccgcgtctttatatccgtttcttaagacgtaaagg

SEQ ID NO: 16433 - RNA, 149 nt, Escherichia coli
  source 1..149: mol_type = other RNA; note = Related to UGCT01000004.1
cccttagcgagtggcttctccggaagttcactggacagtgtttcgctgtcctacatacaatctgaagttttaccagttccctcattgaaaggagaacatctcccgatgttctcctttcacttcggaatctgatttttatgacgtaaggg

SEQ ID NO: 16434 - RNA, 178 nt, unidentified
  source 1..178: mol_type = other RNA; note = Related to NZ_SOZF01000025.1; note = Serratia oryzae
cccttagcgagtagttttctgatgatagctgctggatgcggtttaatgatgagggctactggatagtgtttcgctgtcccacacaaaatctgaagtactgccagtccctacagttgcacgaagaacatcccctgatgttcttcgtgaacttcgggagctgttttttatgacgtaaggg

SEQ ID NO: 16435 - RNA, 147 nt, unidentified
  source 1..147: mol_type = other RNA; note = Related to NWTM01000001.1; note = Pectobacterium sp.
cccttagcgagtcccttgtaagaggtgactggatagtgtctcgctgtcctgcattaaatctactgttttggcagtttacctcgaactcagagaacatctcccgatgttctctgagagcgaggaaacctggtatttatgacgtaaggg

SEQ ID NO: 16436 - RNA, 157 nt, unidentified
  source 1..157: mol_type = other RNA; note = Related to NZ_CP033893.1; note = Serratia liquefaciens
cccttagcgagaggcttaccattcgtgggaacctctggatgctgattcggcatcctgcatgtaatctgagttactgtctgctttccttgttggaacggagagcatcgcttgatgctctccgagccaaccaggaaacccgtcttttttgacgtaaggg

SEQ ID NO: 16437 - RNA, 155 nt, unidentified
  source 1..155: mol_type = other RNA; note = Related to NZ_CAAGXM010000002.1; note = Klebsiella quasipneumoniae
cccttagcgagaggtacttcattcgtgattgcctctgggcgttgtttcggcgtcctgcaactaaactcagtttctgtctgctttccttgtggaacggagagcatcagtggatgctctccgagccacaatgaaatccgttttttttgacgtaaggg

SEQ ID NO: 16438 - RNA, 160 nt, unidentified
  source 1..160: mol_type = other RNA; note = Related to JADTXC010000013.1; note = Serratia ureilytica
cccttagcgagaagtgacttcatgataaaatgagccactttctggatagtgcttcgctatcctgcatttaatcttgttcaatagcagctttcgatgtgaacgacgaacacctctccgtgttcgtcgatcacatcgaaatcagtaacttaaggcgtaaggg

SEQ ID NO: 16439 - RNA, 161 nt, unidentified
  source 1..161: mol_type = other RNA; note = Related to NZ_CGCI01000022.1; note = Yersinia frederiksenii
cccttagcgagaggtagtgatcatttagttgtgagctactttctggatagtgattcgctgtcctgcatttaatctgattcaatagcagctttcaatgtgaacgacgacgacctctcggtagtcgtcgatcacatcgaaaaccgaaacttaaggcgtaaggg

SEQ ID NO: 16440 - RNA, 142 nt, unidentified
  source 1..142: mol_type = other RNA; note = Related to NZ_JAENGP010000011.1; note = Advenella mandrilli
tctttagccgagcgagttgttctcgctggatagtgtttcgctgtcctgcattaaatccaactttatgccgcatgcaaatcttcacaatacctcgcctgaggtattgcctcagatttgcatacgtgcttttaagacgtaagga

SEQ ID NO: 16441 - RNA, 149 nt, Aeromonas hydrophila
  source 1..149: mol_type = other RNA; note = Related to NZ_CP065651.1
tctctagcgagtgggaatttcccgctggatggtgtttcgccatcccacagataatccagaccattgttggccaatgagtttcaatgtgcggagcaagcgctaccgcgcttgaaccgcacattgaaacgagtattcttaagccgtagaga

SEQ ID NO: 16442 - RNA, 141 nt, unidentified
  source 1..141: mol_type = other RNA; note = Related to NZ_BBUL01000097.1; note = Cellvibrio sp.
cctttagcgagtgagcatgctcactggatgttgattatcgccatcctacacaaaaccattgtcaatgcggcttaatttgactatcgaagcacgttccgtgcttcaacagtcaaattaacccatatctaagttacgtaaagg

SEQ ID NO: 16443 - RNA, 156 nt, unidentified
  source 1..156: mol_type = other RNA; note = Related to JAESQK010000141.1; note = Crocinitomicaceae bacterium
tctttagcgagaggtctagcaatagatcgctagtggatggtgtttcgccatcccaagggaaagctgttggatcggcgagagttttctcgggaaaactctcgtccctcaagttctcccgagaaagctctcttccgcaccaattttgtgacgtaaaga

SEQ ID NO: 16444 - RNA, 141 nt, Flavobacterium sp.
  source 1..141: mol_type = other RNA; note = Related to NZ_JAGFBU010000005.1
attttagacgtgttttcattaatacgcgtggttgttgttccgacaatcgagttttaaactcatttttatcatcacaaattttaaacagaaaatcaaaatgatttcctatttaaatttcgctcaagaattttgatgtaaaat

SEQ ID NO: 16445 - RNA, 152 nt, Flavobacterium sp.
  source 1..152: mol_type = other RNA; note = Related to NZ_FOJT01000006.1; note = Flavobacterium swingsii
attttagacgcgatttgtatttatatatttcagcgagtggttgttgttccgacaaccgagttttaaactcatttttataatcgcaaattttaaattagaaaatccggtaggtttgctaatttaaatttcactcaaatgttatgaagtaaaat

SEQ ID NO: 16446 - RNA, 140 nt, unidentified
  source 1..140: mol_type = other RNA; note = Related to JABHCC010000144.1; note = Bacteroidetes bacterium
tttttagacgttgtttatcagcgagtgggtgttgttccggcacccgagttttaaactaagctttattatcgcaaattctaaatttttaaatccagttggtttaataatatagaattcactcaaattttgagaagtaaaaa

SEQ ID NO: 16447 - RNA, 160 nt, Flavobacterium sp.
  source 1..160: mol_type = other RNA; note = Related to NZ_VOGZ02000014.1
tttttagacgcttagtaaattgtgttatgcaattgaaaatgcgagtggatgttgtttcggcatccgagttctaaactcaactttatcatcgcaaactttcatcgcaaagcttcaatgaagcttcacaatgaaacttcactcaaaaattgtgaagtaaaaa

SEQ ID NO: 16448 - RNA, 131 nt, unidentified
  source 1..131: mol_type = other RNA; note = Related to NZ_CP042433.1; note = Flavisolibacter ginsenosidimutans
tttttagacacttcggtgagtgaatgttgttccagcattcgagtttaaaactaaccattataatcacgaatttttgatacaaatccagttggtttatatcaaaacttcgttcaaatgtaaagtagtaaaaa

SEQ ID NO: 16449 - RNA, 131 nt, unidentified
  source 1..131: mol_type = other RNA; note = Related to JACRII010000139.1; note = Planctomycetes bacterium
tttttagacacttcggtagtggatgttgtttcggcatccgagttttaaacaaaactttatcatcgcaaatttatatgtttctttgtttcctcagaaacatataaattcactcaaatgttttgaagtaaaaa

SEQ ID NO: 16450 - RNA, 134 nt, unidentified
  source 1..134: mol_type = other RNA; note = Related to SEFI01000651.1; note = Sphingobacteriaceae bacterium
tttttagacacttcggtggtgggcgctgttccggcgctcgaggctaaaactcagctttattatcgcaaaattcctctctttcctcctgaacgtcgcaaagagaggaatttcactcaaaatttttgaggtaaaga

SEQ ID NO: 16451 - RNA, 158 nt, unidentified
  source 1..158: mol_type = other RNA; note = Related to NZ_JHXV01000023.1; note = Crocinitomix catalasitica
tttttagacgctttttgttgcgttatgtaattaaaaagtgagtgagtgttgttccgacactcgagttataaacctagatactatcatcgcaaattttaagtgcaaaatccagtaggttttacacttaaatttcactcaactattgagaagtattaaga

SEQ ID NO: 16452 - RNA, 144 nt, unidentified
  source 1..144: mol_type = other RNA; note = Related to JAJMPA010000005.1; note = Pedobacter sp.
attttagacatttggtttaccaaatattgggacgttgtttcggcgtccaagaattaaacttagctttatcttccaaaagtatgaagctattgactcgattcctcgcaacatcttcatacttccgtctagtattatgagtaaaaa

SEQ ID NO: 16453 - RNA, 131 nt, unidentified
  source 1..131: mol_type = other RNA; note = Related to WPIF01000004.1; note = Nitrospirae bacterium
tctttagtcgcttcggcgagatgttgattcgacatccaaggtgtaaactaactattgtcttcatgaagttggcactttaatctctcaacgagattaaagtggaacttcattcaagaattttgaggtaaaga

SEQ ID NO: 16454 - RNA, 134 nt, unidentified
  source 1..134: mol_type = other RNA; note = Related to NZ_FSRK01000003.1; note = Epilithonimonas zeae
tatttagaccattttttggagaatagtggttcgctattcgagaagtaaaactatattttatttgtgcaattaaaataatttcctgcgggcactcgaaaattattttaatcacgtaagactttagaaagtaaata

SEQ ID NO: 16455 - RNA, 148 nt, unidentified
  source 1..148: mol_type = other RNA; note = Related to JAIBBL010000001.1; note = Ignavibacteria bacterium
attttagaaaagttctttttagtcgtatgttgggtgttgttcacgacacccctgatcaattgcaacatttagtttcgaaaacttttaatgtaaatgcaggcacagctgatttacattaaaacttctctcaagaattaagaagtaaaaa

SEQ ID NO: 16456 - RNA, 154 nt, unidentified
  source 1..154: mol_type = other RNA; note = Related to JABHDM010000238.1; note = Nitrospina sp.
ttcttagccagaccaagctgggttgccattttggtctgagcggtgattcgccgctctagatgaaaactttggtttatcgtattaatgtttaattgcttctacctcagtttgaggtaggcgcattaaacattaacaattatttttgaagtaagaa

SEQ ID NO: 16457 - RNA, 122 nt, unidentified
  source 1..122: mol_type = other RNA; note = Related to JACDNW010000012.1; note = Candidatus Marinimicrobia bacterium
attttagtcggctattatagcctgggcagtgttttcgctgtccgtgaagaaaactcctcactgtttctctcaaattatgccctctcgggcataatttgagagtcggatttatgaagtaaaat

SEQ ID NO: 16458 - RNA, 123 nt, unidentified
  source 1..123: mol_type = other RNA; note = Related to JAHJJL010000216.1; note = Candidatus Eisenbacteria bacterium
gctttagtcggtcgcttgcgacctgtggacgatgattcgtcgtccgaggtggaaacagagcattattgcggtcaaattgcgacttatggtcgcaattcaaacgcttctcttgtgaagtaaagt

SEQ ID NO: 16459 - RNA, 134 nt, unidentified
  source 1..134: mol_type = other RNA; note = Related to QQUH01000007.1; note = Chloroflexi bacterium
cccttagacgatgcttgcatcagtgggtgatgattcgtcgcccgaggctaaaaccagttcattatttgcaagcgaacacccaccatggctccgccatggattaagttcgcttgcattggtggttgaagtaaggg

SEQ ID NO: 16460 - RNA, 136 nt, Bacillus sp.
  source 1..136: mol_type = other RNA; note = Related to WBOQ01000050.1
tacttagaaccaagctttttttggatagtgtttcgctatccacagttaaaactcgtgtttaacctacgcaataaacacacaatgagtatcgccatactcattgaatgtttattgctcggattatttatggtaagta

SEQ ID NO: 16461 - RNA, 142 nt, Bacillus sp.
  source 1..142: mol_type = other RNA; note = Related to JAIUXW010000030.1; note = Bacillus toyonensis
tacttagaaccaagctttttttttggggatagtgattcgctatccttagttcaaactcgctattaaccttatatcaataagcacacaatgagtatagccatactcatcgtgcacttattgaccggattatttatggtaagta

SEQ ID NO: 16462 - RNA, 135 nt, Bacillus sp.
  source 1..135: mol_type = other RNA; note = Related to NTXH01000057.1; note = Bacillus cereus
tgcttagaaccaagcttgttaaaggatagtgtttcgctagcctagtaaaatctctgttatacctatatcaataacagaaaatctatatctccatatatattttctgttattgatcgagactatttatggtaagca

SEQ ID NO: 16463 - RNA, 136 nt, unidentified
  source 1..136: mol_type = other RNA; note = Related to NZ_NPBP01000019.1; note = Terribacillus saccharophilus
tgcttagaaacctacttttaccgatagtgattcgctatcgtagtaaattacatgcttttcaaccatggctgttaaaccccctcgtttcaccaggaaacaagttgatttaacagccaaggcttacttatggtaagta

SEQ ID NO: 16464 - RNA, 137 nt, unidentified
  source 1..137: mol_type = other RNA; note = Related to JIBW01000002.1; note = Bacillaceae bacterium JMAK1
tgcttagaaatcaatattaatcgatagtgttccgctgtcgtagtttataaatcgcttttaaccattactgttaggaacaaattgcttcctccgaaccaatattgatcctaacagcaaaggcttatttatggtaagtg

SEQ ID NO: 16465 - RNA, 138 nt, Bacillus sp.
  source 1..138: mol_type = other RNA; note = Related to PYWO01000004.1; note = Bacillus subtilis
tgcttagatatcattaatttaagaacagtgtttcgctgttctagtatattaacatctttttttctttctatgataaacacaacgctattcaacctgaatatcgttgcatttatccaagaagtttatttatggtaagca

SEQ ID NO: 16466 - RNA, 171 nt, unidentified
  source 1..171: mol_type = other RNA; note = Related to NZ_JAGXBY010000001.1; note = Ornithinibacillus sp.
ggcttagttaatattatttttctttttacatattacaatttagaaggaaaataataggagtagtgattcgctattctttaattaaacttcaggtttagcttttaaacaaatatgcggctatattttccaaatatcccctcacatttgtttaaaatgtccttagggtaagcc

SEQ ID NO: 16467 - RNA, 131 nt, unidentified
  source 1..131: mol_type = other RNA; note = Related to QBUM01000164.1; note = ANME-1 cluster archaeon GoMg2
atctcagatgagcttcggctagaggatggtgcttcgccatcccagatgaaatcgcctccattgtttcgattgaatcttacgtacaggcctcctgtacgcaaccttcaatccactgtattttagagtgagat

SEQ ID NO: 16468 - RNA, 131 nt, unidentified
  source 1..131: mol_type = other RNA; note = Related to MGVG01000053.1; note = Elusimicrobia bacterium RIFOXYA2_FULL_53_38
aatttagaaagagagggggtggtgccttcgccgccctaggtgcagaacatcctagaagttccgctagaattcagccaatctcgcagtagcagcgattggatgaattctagcagtatgtttgtgagtaaatt

SEQ ID NO: 16469 - RNA, 149 nt, unidentified
  source 1..149: mol_type = other RNA; note = Related to MZGT01000125.1; note = Clostridium chromiireducens
ggcttagaacgttaaggtgcatttctttaactgggtagtgtttcgctactctggatggatactgaatattattttagtaaacaatcatgcttcttaaaagagcaattttaagaagcacaattgtttactaatagctaattgtgtaagct

SEQ ID NO: 16470 - RNA, 169 nt, unidentified
  source 1..169: mol_type = other RNA; note = Related to JAJAXF010000024.1; note = Laribacter hongkongensis
tctctagcgggcctaaccaagttcaagccgagcttgcaacaaggttcaagccggatagtgcttcgctatccaacactgccgtggtgagatggtcattcccgtataacacggagaatggccccaccattctccgtgttatacgggaatgatagatcttttgtcgtaggga

SEQ ID NO: 16471 - RNA, 179 nt, unidentified
  source 1..179: mol_type = other RNA; note = Related to NZ_MWJI01000004.1; note = Paraclostridium bifermentans
tctttagagaacactatttaagttactataggtgcgcatattatatagtacttattgtagttagagatgattcgtctctgttagaatttaagtgtattaatatttcattaattgtttcacttcatccacggtcaagtgaatgaattaaaacaattaattcaaaagatttatggtaaggg

SEQ ID NO: 16472 - RNA, 180 nt, unidentified
  source 1..180: mol_type = other RNA; note = Related to CP037830.1; note = Clostridioides difficile
tctttagagaacactgttataagttgctatagatgcgcatgttatatggtacttattatagttagagatgattcgtctctgttagaatttaagtgtatttatatttcgtaattgtttcaatttattcaacattaagtatgaaaaattgaaacaattaactcaaaagatttatggtaagga

SEQ ID NO: 16473 - RNA, 178 nt, unidentified
  source 1..178: mol_type = other RNA; note = Related to NZ_CABIXZ010000002.1; note = Intestinibacter bartlettii
cccttagaaaacactatataaatttacaaagcgcgcaaattttgtaagtttatttagttggagatgattcgtctctgtctgaaaacaaagtatactgatatatcattaaatatttgatacatttgtcaatccaacaaatgtatcttcatatttaattcaaagaattaagtggtaaggg

SEQ ID NO: 16474 - RNA, 171 nt, unidentified
  source 1..171: mol_type = other RNA; note = Related to NZ_BHYK01000003.1; note = Clostridium tagluense
cctttagagaccactatataatagtattgatcataaaagtactcctatttatagttggagatgattcgtctccctaagtgtttaatttagtagtatcttaattaaatgttccaatccatccacattgtgaatgaattaaaacatttaatcaagaatgatttatggtaaagg

SEQ ID NO: 16475 - RNA, 177 nt, unidentified
  source 1..177: mol_type = other RNA; note = Related to JACBEK010000003.1; note = Clostridium botulinum
tctttagagaacactatatgataaatttatttcgcgatataatatttttattattatagttgaggatgattcgtcttcttatgaattaactatagagtatttcaattaaatagctcaaatcatccacagtagtgaataatttaatctatttaatcgaaaaagtataaatggtaaaga

SEQ ID NO: 16476 - RNA, 169 nt, unidentified
  source 1..169: mol_type = other RNA; note = Related to NZ_JZJQ01000041.1; note = Clostridium sporogenes
cctttagaaagcactatgttgtagcaataatagtactagctattttcatagtcgaagatgatacgtcttcataagaatttagtagagcattatttaaattaaatcgatgaactcatccacaacagtgaatgacttaatcgatttaatctaaaaagatttatggtaaagg

SEQ ID NO: 16477 - RNA, 169 nt, unidentified
  source 1..169: mol_type = other RNA; note = Related to NZ_FQXP01000010.1; note = Clostridium collagenovorans
cctttagaaagcactatgttgtaacaaaaatagtactagttatttgcatagtcgaagatgattcgtcttcataagtatatagcaaaatataatttaaattaaatcgattaattcattcacagctgtgaataacttaaacgatttaatctaaaaagatttatggtaaagg

SEQ ID NO: 16478 - RNA, 150 nt, unidentified
  source 1..150: mol_type = other RNA; note = Related to JAGZKV010000024.1; note = Clostridiales bacterium
ttttcagttaatacatattgcagcgcaatgtgttcggaagatgattcgatcttctttggtgaatggttatacatgattcagccagtttagacgtctaaaccacagaagtggaatagccgtctaaactatatgaaagatttatggtgaaag

SEQ ID NO: 16479 - RNA, 152 nt, unidentified
  source 1..152: mol_type = other RNA; note = Related to PYLO01000002.1; note = Clostridium fessum
tttttagtttatacataacgtattattacattgtgttcggaagaagattcttgcttccttggtgtatggtccacatgattcgttatgcttagcagtatagttcatagtcatgaattatccagctaaccctaacgaaaaacttatggtgaaag

SEQ ID NO: 16480 - RNA, 149 nt, unidentified
  source 1..149: mol_type = other RNA; note = Related to JAFQFZ010000002.1; note = Clostridia bacterium
cttttagctattacatattgttttcaatatgttcggaaggcgattcgccttccttggtggatgattccacacgattccttaactttagccgtctatctcacatcgagtgaaatagacaactaaacttaacgaaaagtttctggtaaaag

SEQ ID NO: 16481 - RNA, 161 nt, unidentified
  source 1..161: mol_type = other RNA; note = Related to NZ_WIQR01000001.1; note = Pectinatus frisingensis
cttttagtcttgcatattgttatgttaatatgctttggaagatgtttcgtcttcttaggtcttaatgctctcattattccctattgcttaatcgctaatgccacattcgtggcatcatcaactaatcaatagcgaaatgtaagttcggtaatcggtaaaag

SEQ ID NO: 16482 - RNA, 150 nt, unidentified
  source 1..150: mol_type = other RNA; note = Related to PGZR01000048.1; note = Firmicutes bacterium HGW-Firmicutes-4
cctttagatttagcatattaaatttaatatgcgttggaagatgattcaatcttctgtagcgtaacatcgtacatgattagcttaatttaactagatactccacatacgtgaagcatctagccaaattaatcaaaagaattaaggtgaagg

SEQ ID NO: 16483 - RNA, 166 nt, unidentified
  source 1..166: mol_type = other RNA; note = Related to BK019570.1; note = Siphoviridae sp.
cttttagtttttacaattctttatgtaagtctacatattttattgttttggacggtgattcgccagtccttggttaaacgcttactcacaattcgtgatataaaacattttattaaagcacttgtttcaataaaatttttatctcacgaaagacttatggtaaaag

SEQ ID NO: 16484 - RNA, 176 nt, Bacillus sp.
  source 1..176: mol_type = other RNA; note = Related to NULM01000015.1; note = Bacillus thuringiensis
ctcttagatgttgcacttaattcatatagtgtgcacatatttattatgttttaggtgttgggagatgattcgtcttccagaatggtatattatgcatgatttttcaaaagtaagtgtctaaatccacaaaggtgaattcatacacttacttttaaaaaaaagacttagggtaaggg

SEQ ID NO: 16485 - RNA, 177 nt, Bacillus sp.
  source 1..177: mol_type = other RNA; note = Related to NZ_CP035996.1; note = Bacillus mycoides
ctcttagacgttacgcttaactcataggttgtgcacatattggttatgttttaggtgttggggagatgattcgtcttccagaattttatatcaagcatgatttttcaaaagtaagcgtttaactccacaaaggtgaagtcatccacttacttgtgaaaaaaagattaaaggtaaggg

SEQ ID NO: 16486 - RNA, 177 nt, Bacillus sp.
  source 1..177: mol_type = other RNA; note = Related to NVKK01000033.1; note = Bacillus thuringiensis
ctcttagatgttacttcttaattcataaattgcgcatatatttattatgttttaagtagtggaagatggttcgtcttctaaagttttatgtcagacatgatttttcaaaataaatcgtgtaacttcacaaaggtgaagtcacacgattcatttagaaaaaattaccaaaggtaaggg

SEQ ID NO: 16487 - RNA, 178 nt, Bacillus sp.
  source 1..178: mol_type = other RNA; note = Related to NVCK01000005.1; note = Bacillus thuringiensis
ctcttagatgatactgactaaattcataattatgtacattattttatgatttggttatgtgggagatgattcgtcttctattgtgctaagtgagaactagatttaccagaagaaagtccattacttcaccctcgtgaagcaacaaactttcttctgataaaaggattttaggtaggag

SEQ ID NO: 16488 - RNA, 174 nt, unidentified
  source 1..174: mol_type = other RNA; note = Related to NZ_BHYK01000016.1; note = Clostridium tagluense
ctcttagaagttgctaccattacataaaagtgtacataaaatttacgtataggtagtgggggacgtttcgctcttcctatgttcgatgtcaagtctgtatttttaaaagtatccgagttccttaaagacatttaagaaactcaaatacttttcaaaaagtaataagggtaagag

SEQ ID NO: 16489 - RNA, 175 nt, unidentified
  source 1..175: mol_type = other RNA; note = Related to NC_016627.1; note = Acetivibrio clariflavus
tccttagatgctactacttttgtataaacgtgcacaatatttatttatatgaaagtagtgggaagtggttcgctttccgaggtgctatgtcaggactatatttaatgaagtaagcgtccaacttcatatatatgaagttagccacttacttcatcaaaaggaataaaggtaagga

SEQ ID NO: 16490 - RNA, 178 nt, unidentified
  source 1..178: mol_type = other RNA; note = Related to VOHC01000030.1; note = Planomicrobium sp.
ctcttagatgtcactgattagatgcccaaacatgtacatggttttggagtttagttatgtgggagatggttcgtctcctgttgtgtaaagcaaggaattgattcatcagaagaaggagtaaaactccacgacagtgaagttctccaccttcttcagataaaattgtttttggtaagag

SEQ ID NO: 16491 - RNA, 177 nt, Bacillus sp.
  source 1..177: mol_type = other RNA; note = Related to NFEK01000132.1; note = Bacillus thuringiensis
cccttagatgtttctattttttctcatagatgtgcacatttatttatgtataaaaatggtcgggggatggttcgtcttcttaagtttaatactaacatgtacttgtagagagtaagtggacaactccacgacggtgaaattctccccttactctctacaaattaataaaggtaaggg

SEQ ID NO: 16492 - RNA, 151 nt, unidentified
  source 1..151: mol_type = other RNA; note = Related to NZ_AWTC01000001.1; note = Sporolactobacillus laevolacticus
tttttagaattttctctttgaaacttgaagagtgagaaatggtgattcgccattttaagtgaaatgtgagataacttatttgaataataatcctcacatttacaacgtaaatattcggctcattattcaaatatctaatgactggtaaagg

SEQ ID NO: 16493 - RNA, 179 nt, unidentified
  source 1..179: mol_type = other RNA; note = Related to BMCJ01000003.1; note = Thalassobacillus devorans
ttcttagaaattactactaatttcatgaagtgtgcacattaaattcatgctattagtatgtgggagacggttcgtcgacctttagcataacaatcaggttagatttgtggaacctgcaccttcaatctcacgacagtaagattaaaggcacatttccacaaaatgatttatggtaagga

SEQ ID NO: 16494 - RNA, 178 nt, unidentified
  source 1..178: mol_type = other RNA; note = Related to NZ_ATVM01000016.1; note = Marinococcus halotolerans
ccctcagtcattatgattggtatcggataagcgtgcacattctttaagatatcgaatcatgggggacggttcgtctaccctttgtttaaagttactattgattttcacatttatgcgttatactttcactatcgtaaaaattaacgcataattgccaaaaagttttttagggtgaggg

SEQ ID NO: 16495 - RNA, 181 nt, unidentified
  source 1..181: mol_type = other RNA; note = Related to NZ_JALIRM010000001.1; note = Lederbergia wuyishanensis
cccttagattttattgcaagttttatagagggtgcactactcaaactctataagacacggtaatgggagacggttcgtcatcctatggttaaatgacattcattattcttgatattatgtgttaaatctcacgataagtgaaattcaccccataatttcaataaattacttttggtaaggg

SEQ ID NO: 16496 - RNA, 157 nt, unidentified
  source 1..157: mol_type = other RNA; note = Related to JAFVTV010000006.1; note = Clostridia bacterium
ttcttagatcgttgcaggtgtggctacatatctgtctacgggggatggttcgtctccctgagttttttaacaaagtcagagttgctccaaatcaaggagaaactccacgacagtgaacttcctccttgatttggaggcaaagaaatagtggtaagaa

SEQ ID NO: 16497 - RNA, 159 nt, unidentified
  source 1..159: mol_type = other RNA; note = Related to FRCT01000015.1; note = Ruminococcus flavefaciens
ttcttagcctgttgaagaaagagtttctccgacttcctacggaagatggttcgtcttcctaagtttcaaacattatcatagttacacaaaagcaatgtaaaactccacgactgtgaactttaacattgctttcgcgataaaacattttttgtgtaagaa

SEQ ID NO: 16498 - RNA, 168 nt, unidentified
  source 1..168: mol_type = other RNA; note = Related to NZ_AUFC01000039.1; note = Anaerovorax odorimutans
ttcttagaacgttataggaacatactagttggtagtacatacctatttacgggaaatgattcgtttccctaagctacttagcaaatgcggaattgctccaaaatcatgagcaattccacgacagtgaaattgctcccaattttggagacaaaacactaatggtaagaa

SEQ ID NO: 16499 - RNA, 151 nt, unidentified
  source 1..151: mol_type = other RNA; note = Related to JAJEQN010000018.1; note = Lachnospiraceae bacterium CLA-AA-H224
ttcttagaacgttgcaggtacatatctgtttacggaagatggttcgtcttcctaagaaaattaacaaacacagagttactccaatcaatggagtaaccccacgacagtggatttcctccattgattggaggtaaaggatttaaggtaagga

SEQ ID NO: 16500 - RNA, 152 nt, unidentified
  source 1..152: mol_type = other RNA; note = Related to NZ_JADPGV010000001.1; note = Blautia luti
ttcttagaacgttacagatacatatctgtttacggaagatggttcgtcttcctaagaaaattaacaaacacagagttactccaatcaatggagaaactccacgacagtgaacttcctccattgattggagacaaagagatttaaggtaagga

SEQ ID NO: 16501 - RNA, 152 nt, unidentified
  source 1..152: mol_type = other RNA; note = Related to RAYQ01000024.1; note = bacterium 0.1xD8-82
atcttagagtgttacagatacatatctgtttacgggagatggttcgtcttcctaagagaattaacatatacagagttactccaatcaatggagtaactccacgacagtgaagtttctccattgattggaggtaataattattaaggtaagaa

SEQ ID NO: 16502 - RNA, 159 nt, unidentified
  source 1..159: mol_type = other RNA; note = Related to JACOPD010000001.1; note = Lachnospira sp.
atcttagaacgttactgatacatatttttgttgaagtttatggaggatggttcgtcttccggagaatatgaacatgaccagagttggtcaaaaccatggtgtaattccacgacagtgaaatcccaccatggttttgacgcaaaatatataaggtaagaa

SEQ ID NO: 16503 - RNA, 160 nt, unidentified
  source 1..160: mol_type = other RNA; note = Related to JAFQRZ010000003.1; note = Agathobacter sp.
atcttagaacgttacagatacatacttatgtagaagtttatgggagatggttcgtcttccggagcaaattaacatgaccagagttggtcaaaaccatggtgtccttccacgacagtgaaaccccaccatggttttgacgcaaaaatatttatggtaagaa

SEQ ID NO: 16504 - RNA, 159 nt, unidentified
  source 1..159: mol_type = other RNA; note = Related to JADJOK010000004.1; note = Veillonella sp.
atcttagaacgttgcagatacatatttatgtagaagtctatgggagatggttcgtcttcctgagtaaattaagataaccagagttggtcaaaaccatggtgctattccacgacagtgaaatacccccatggttttgacacaaaatatttaaggtaagaa

SEQ ID NO: 16505 - RNA, 161 nt, unidentified
  source 1..161: mol_type = other RNA; note = Related to JAFUIR010000009.1; note = Lachnospiraceae bacterium
ttcttagaacgttatggatacatatttttatgttgaagtctacggaagatggttcgtcttcctaagtaatgaaattaaaccagagtttgccacaacaatgtggctattccacaatggtgaaatacccccattgttgtggcataaaatattgaaggtaagga

SEQ ID NO: 16506 - RNA, 146 nt, unidentified
  source 1..146: mol_type = other RNA; note = Related to FRDH01000006.1; note = Butyrivibrio hungatei
atcttagatgcgttgcagcaagtgttgtgtacggaagatgattcgtcttcccaagaaaatcatttggtttagttgaataaaactagtctttatgcgcatagccatgcacataaagattgttttatccaaaatatatttggtaagaa

SEQ ID NO: 16507 - RNA, 178 nt, unidentified
  source 1..178: mol_type = other RNA; note = Related to QUES01000001.1; note = Eisenbergiella sp.
ctcttggaaacgttggttaggtattggatgtgctttggtacatatcaacctttctttaagggaaatggttcgtttcctttagattattaacttagagggtataccgcgacaagatgcgctgataagcagattactgtttatcatcacctcttgtcgtgctaaatatttttggcaaggg

SEQ ID NO: 16508 - RNA, 154 nt, unidentified
  source 1..154: mol_type = other RNA; note = Related to NZ_UFVT01000001.1; note = Blautia coccoides
ttcttagaattgttgttaatatgcatacatagcaactaggggtcgctacgacctcgtgagaataataattacatgaactcagctaaaacaacggtgaacttccacaatagtgaaactcccccgttgttttacccgaaagtacattgagtaagat

SEQ ID NO: 16509 - RNA, 154 nt, unidentified
  source 1..154: mol_type = other RNA; note = Related to JACOPE010000001.1; note = Ruminococcus sp.
ttcttagaattgttgttaatatgcatacatagcaactaggggttgtttcgacctcgtgagaataataattacatgaactcagctaaaacaacggtgaacttccacaatagtggaactcccccgttgttttacccgaaaatatattgagtaagaa

SEQ ID NO: 16510 - RNA, 154 nt, unidentified; identical to SEQ ID NO: 16509
  source 1..154: mol_type = other RNA; note = Related to JAJBQL010000016.1; note = Mediterraneibacter faecis

SEQ ID NO: 16511 - RNA, 155 nt, unidentified
  source 1..155: mol_type = other RNA; note = Related to MCGH01000001.1; note = Eisenbergiella tayi
ttcttagaattgttgttaatatgcattatataacaactaggggttgtttcgacctcaaaagaattataatcacatgtacttagctaaatcaacggtgaacttccacgacagtgaaactcccccgttgatttacccaaaatcatattgagtaaggg

SEQ ID NO: 16512 - RNA, 155 nt, unidentified
  source 1..155: mol_type = other RNA; note = Related to FMFO01000004.1; note = Roseburia sp.
ttcttagaattgttgttaatatgcattacataacaactaggggttggttcgacctcggaagaataataaacacatgaaattagctaaatcaacggtgaacttccacgacagtgaaactcccccgttgatttacccaaaaacatattgagtaagaa

SEQ ID NO: 16513 - RNA, 148 nt, unidentified
  source 1..148: mol_type = other RNA; note = Related to QXXC01000007.1; note = Clostridiaceae bacterium
cgcttagaattgttaatgtgtgctacatattgactgggagcagttcctgcttcgtttgaagaatcatgacccgtatccatcgtagtttcatgagcgaaaaatggttgtttcgatcatgaaactacgccggaaatatactgagtaagcg

SEQ ID NO: 16514 - RNA, 147 nt, unidentified
  source 1..147: mol_type = other RNA; note = Related to BMDT01000015.1; note = Enterococcus alcedinis
ttgttagatatctcccaattgggtatactagcgatgtttcgtcgctgtcagtggaatacacgcaattcgaatgttaaagtctttcccccaactcactacaaagtagtaactcgtggaaaagactttaaaagctatttttggtaatga

SEQ ID NO: 16515 - RNA, 126 nt, unidentified
  source 1..126: mol_type = other RNA; note = Related to JAEHOK010000008.1; note = Salegentibacter maritimus
cttttagaattagagtagccgttaatagtgcgatgattcgtcccactggttttaacttacatttatacaatgaattaagtgtcaaaaacgtcagagttttcaacccttaattgatttaagtaaaag

SEQ ID NO: 16516 - RNA, 127 nt, unidentified
  source 1..127: mol_type = other RNA; note = Related to NZ_LGTQ01000015.1; note = Jiulongibacter sediminis
cttttagcattaaagtagccattaatagaatgacgtttcgtctttctggtctcaacttacatttatacaataaacttagattttgaaaacgttagagttttcaaaactaactttatctaagtaaaag

SEQ ID NO: 16517 - RNA, 146 nt, unidentified
  source 1..146: mol_type = other RNA; note = Related to NZ_CP047218.1; note = Sphingobium yanoikuyae
accttaaactctgggtgagcaatcacctgcgggattagcttcggttaatcctcccacttgtcggcagggtgacggccccccccggggggaccgcccggcatccccgataaggcgcgtcccggtggacgggacgcgaagagttaggg

SEQ ID NO: 16518 - RNA, 130 nt, unidentified
  source 1..130: mol_type = other RNA; note = Related to SDYH01000014.1; note = Alphaproteobacteria bacterium
accttaacctctgggtgagtaatcacctgcgggattggctttcgttaatcctcttacttgtcggcagggtgacggtccccggcatccccgataaggcgcgtcccggtggacgggacgcgaagagttaggg

SEQ ID NO: 16519 - RNA, 144 nt, unidentified
  source 1..144: mol_type = other RNA; note = Related to NZ_JACIJI010000005.1; note = Stakelama sediminis
cacttaacctctgggtgagaaatcgcctgcgggatcaccttcggggggtcctcacacttgtcggcaggaagaggggacccgcaccgggaccaccaccgccaccgataaggcgcgtccgtgtggaccggacgcgaagggttgggg

SEQ ID NO: 16520 - RNA, 146 nt, unidentified
  source 1..146: mol_type = other RNA; note = Related to JACYUG010000012.1; note = Sphingomonas sp.
cacttaacctctgggtgagcaatcacctgcgggacctgctccggccggtcctcctacttgtcggctcgtgtggaggcaccccgcccggggaccgccgtcgccaccgataaggcgcgcccgtgtggagcgggcgcgaagggttaggg

SEQ ID NO: 16521 - RNA, 139 nt, unidentified
  source 1..139: mol_type = other RNA; note = Related to NZ_CP050137.1; note = Sphingomonas sp.
ccactgaactctgggtgagtaatcacctgcggggtctgcttcggctgatcctcacacttgtcaggagcttgagggccccccgcgaggggaccgccgacggcaccgataaggcgcgtccgtgtggaccggacgcgaaggg

SEQ ID NO: 16522 - RNA, 146 nt, unidentified
  source 1..146: mol_type = other RNA; note = Related to FNWK01000001.1; note = Sphingopyxis sp.
accttaaactctggatgagcaatcatccgcgggatcggtttcggcagatcctcccacttatcggcaaagtgagggcaccgcacgcgcgggaccaccgccaccaccgataaggcgcgttcgggtggaccggacgcgaagggttaggg

SEQ ID NO: 16523 - RNA, 130 nt, unidentified
  source 1..130: mol_type = other RNA; note = Related to JAERLA010000016.1; note = Acetobacter thailandicus
accttaaactcggggtgagtaatcacctgtggaaccaacttcggtaggttctctcattagtcggccgcatggagagcaccacgatcgtcgataaggcgcgtcctggtggagcggacgcgaagagttaggg

SEQ ID NO: 16524 - RNA, 141 nt, unidentified
  source 1..141: mol_type = other RNA; note = Related to QRDP01000004.1; note = Parasphingopyxis lamellibrachiae
ccgctcaacctcggggggagaaatcccctgtgggatcctcgtgatcctcatacttatcggcagaagtaggggctcccttctcgggaacgtcccgcgacaccgataagggcgcccggtgcggccgggcgcgaaggttctggg

SEQ ID NO: 16525 - RNA, 136 nt, unidentified
  source 1..136: mol_type = other RNA; note = Related to NZ_FOJU01000001.1; note = Poseidonocella pacifica
gcgccacaggctgaccggttttccggtcgaggaggcttcggcctctacccactttgggggcggcggcgatcgcgagcgacagatgcgatcggcgacgacttccgacttaaggccgcagcgcacgttgcggcacggg

SEQ ID NO: 16526 - RNA, 145 nt, unidentified
  source 1..145: mol_type = other RNA; note = Related to JAGQDF010000002.1; note = Ideonella sp.
tcgactgttggggtgctacagcaccctgtggggccgaaaggctctaactactcgcaagcccacgccgcacggtgccggtcctccggtgcgcggtacggttggggccggtgcgagcctgcccgggcgaccccgggcaggcatctgg

SEQ ID NO: 16527 - RNA, 146 nt, unidentified
  source 1..146: mol_type = other RNA; note = Related to NZ_CADEWJ010000013.1; note = Burkholderia gladioli
tcgtgtcagtggggtgtaaagcaccctgtgggaccgaaaggtcctgtcttttgctaggccgcgtgccgtggagccgagtatctgaacggaccatggcaacgtagctgatgcgagcatgcccgggacgacaccgggcatgcattggg

SEQ ID NO: 16528 - RNA, 166 nt, unidentified
  source 1..166: mol_type = other RNA; note = Related to NZ_CP091716.1; note = Variovorax paradoxus
aagtcaaaaacggagtcatggaaacgtggctcgtggaaatcgaaagatttctgacatctgctgggcacgccgcgcttacttggatctctctttcaagaagagccagccttgtgagcttgtcgtgcctaggcagcacgcttcatacgagtctgaagcgacactggcg

SEQ ID NO: 16529 - RNA, 204 nt, unidentified
  source 1..204: mol_type = other RNA; note = Related to NZ_KB905036.1; note = Variovorax paradoxus
ttgtcaaaaacggagcggcggcaacgttgctcgtgggaatcggaagattcctgacttctgcccagcacgcggttcctaatgcaccggcgcccggagatgcttacgacagcaatgccgttcgcataatcgtgttgcttagtacgaggtcctgcgtgtctgtgtagcgcagacggttccagacgagctggaaccgttttaatggcc

SEQ ID NO: 16530 - RNA, 178 nt, unidentified
  source 1..178: mol_type = other RNA; note = Related to JAGPDY010000016.1; note = Rhodoferax sp.
tcgtgaaaagtgggatgacggtaacgtcatccgtgggggctgaaaggcttctaacttctgcctggcacgtaacgcgacgcaactttgcaccacgacgacaatgacggcgtgattcggttggtagcaatgcgtggctgagcagcgaaacaggtcctggacgagccaggacctgtttaat

SEQ ID NO: 16531 - RNA, 142 nt, unidentified
  source 1..142: mol_type = other RNA; note = Related to NZ_NIAZ01000004.1; note = Acidovorax sp.
tcgttaatcgtggggatgtgggaacgcatctcgcggggccgaaaggctctgatgttctctgcggtcacgcggtcgccggtacgcggtggtccgggtggttgcagcgaagccggtcccggacgagtaccgggaccggttaggg

SEQ ID NO: 16532 - RNA, 133 nt, unidentified
  source 1..133: mol_type = other RNA; note = Related to JAHJNJ010000041.1; note = Gammaproteobacteria bacterium
tcgttaaaagcggggcatgaaagtgctcgtggcagtcgcaaggctgctaatgttcacgcaggcacgcggtcggtcgcatatgacggtgtatgccgtgaagccggtcccgaacgagattcgggaccgtttgaga

SEQ ID NO: 16533 - RNA, 143 nt, Pseudomonas sp.
  source 1..143: mol_type = other RNA; note = Related to NZ_QJUP01000005.1; note = Pseudomonas kirkiae
tcgtcaagcgaggggcgcgtaagcgctcgtggcggccgaaaggctgctgatgttcaccgcgggcatggcactggtcgggttggtccggtcgggtcgatcctgcggcgaagccggtcccggacgagttccgggaccggttgaga

SEQ ID NO: 16534 - RNA, 152 nt, unidentified
  source 1..152: mol_type = other RNA; note = Related to CP077683.1; note = Geomonas subterranea
ccttagaatactgggggtattgccccccgaggaggattaagtaagccctctgccttttcctgcggccatgcatggcacccggatgtcagtcggatgaccctgagtggttgatgggagagcctcttcgcggcgacgcgaagaggcaaatagta

SEQ ID NO: 16535 - RNA, 117 nt, Aeromonas hydrophila
  source 1..117: mol_type = other RNA; note = Related to NZ_NKXI01000009.1
aagcttaaaataggagcgaaagctctgtggagtgtaagtgctctaacagatccggtgaggcggccacgcgaactgtcgccacggcgcccggatcgccccgctgtgagcggggcaggt

SEQ ID NO: 16536 - RNA, 118 nt, Aeromonas sp.
  source 1..118: mol_type = other RNA; note = Related to CP043321.1; note = Aeromonas jandaei
aagctaaagataggagcgaaagctctgtggagtgcaatgtgctctgactgatccggtgaggcgcccacgcgaactgtcgccacggcgcccggatcgccccgctgtgagcggggcaggt

SEQ ID NO: 16537 - RNA, 118 nt, Vibrio sp.
  source 1..118: mol_type = other RNA; note = Related to AAXMMD010000082.1; note = Vibrio cholerae
aagcttaaaattaaggtaataccttgcggagtttaaaaaactctaactgatccggtgaggcgactgcgcctattctcgccactggcgcccggatcgccacgctgtgagcgtggcaggt

SEQ ID NO: 16538 - RNA, 116 nt, unidentified
  source 1..116: mol_type = other RNA; note = Related to NZ_CP074587.1; note = Pseudoalteromonas piscicida
aagcttaaaattaaggtaataccttgcggagtgtaaactctaactgatccggtgaggcggctgcgcctattctcgcctctgggcgcccggatcgccacgctgtgagcgtggcaggt

SEQ ID NO: 16539 - RNA, 139 nt, unidentified
  source 1..139: mol_type = other RNA; note = Related to VXNK01000080.1; note = Rhodospirillaceae bacterium
tcgtctgaaactggggccgaatggccctgcgggagcgtgtctcccaccactgtctcggcacacgccatcccggtcacccggtcacgcgcgccgagtggagccgccaagcacgaggcagccttggcggctagggtacggg

SEQ ID NO: 16540 - RNA, 135 nt, Pseudomonas sp.
  source 1..135: mol_type = other RNA; note = Related to JAKMVT010000021.1; note = Pseudomonas syringae
tcgcagatgtgggggcttcggccctgtggaggttcgcctctaacccttccccacgcgcgccgaggcctcagcaccactggccaccgggccgcgaagggatactgcttccgcgcgagacggaagcaggtgctcaga

SEQ ID NO: 16541 - RNA, 135 nt, Pseudomonas sp.
  source 1..135: mol_type = other RNA; note = Related to NZ_CP056030.1
tcgcagctgtgggggcttcggccctgtggaggttcgcctctaacccttccccacgcgcgccgaggcctcagcaccactggccaccgggccgcgaagggatactgcttccgcgcgagacggaagcaggtgctcaga

SEQ ID NO: 16542 - RNA, 141 nt, Pseudomonas sp.
  source 1..141: mol_type = other RNA; note = Related to FNSP01000003.1; note = Pseudomonas marginalis
tcgcagatgtgggggcctcggccctgtggaggttcgcctctaacccttccccacgcgctccggagcctcagcaccactggccactggccacgggccgcgaagggatactgcttccgcgcgagacggaagcaggtgctcaga

SEQ ID NO: 16543 - RNA, 135 nt, Pseudomonas sp.
  source 1..135: mol_type = other RNA; note = Related to JAEKFB010000009.1
tcgtagatgtgggggcttcggccctgtggaggttgaacctctgacccttccccacgcgctccgaagcctcagcgtcacaggtctcgggtcgcgaagggatactgcttccgcgcgagccggaagcaggtgctcaga

SEQ ID NO: 16544 - RNA, 134 nt, Pseudomonas sp.
  source 1..134: mol_type = other RNA; note = Related to NZ_UWFM01000116.1; note = Pseudomonas viridiflava
tcgtagatgtgggggcttcggccctgtggaggtttacctctaacccttccccacgcgctccggagcctcagcatcacaggtctcgggtcgcaacgggatactgcttccgcgcgagccggaagcaggtgctcaga

SEQ ID NO: 16545 - RNA, 134 nt, Pseudomonas sp.
  source 1..134: mol_type = other RNA; note = Related to JAAQYG010000033.1; note = Pseudomonas lundensis
tcgctgttgttggggccttggccccgtggaggcttgcctctaaccccttccccacgcgattcggcacccggcagtacgcggatccggatatgcagggatactgcttccgtgcgagtcggaagcaggtgctcaga

SEQ ID NO: 16546 - RNA, 134 nt, Pseudomonas sp.
  source 1..134: mol_type = other RNA; note = Related to NZ_JACVZE010000010.1; note = Pseudomonas pisciculturae
tcgctgttgtgagggcttcggtccagtggaggcttgcctctaaaccctttcccaagcgcttcggcacccggcagcacagggatccggagacgtggggatactgcttccgtgcgagtcggaagcaggtgctcaga

SEQ ID NO: 16547 - RNA, 139 nt, Pseudomonas sp.
  source 1..139: mol_type = other RNA; note = Related to NZ_LUUE01000002.1; note = Pseudomonas protegens
tcgcttgttgtgagggcttcggcctagtggaggcttgcctctaatccttccccacgcagttcgcccgcccgtccgtgatgccgggagcgcgatatgccgggatactgattccgtgcgagacggaatcaggtgattcaga

SEQ ID NO: 16548 - RNA, 115 nt, unidentified
  source 1..115: mol_type = other RNA; note = Related to CP008911.1; note = Burkholderia pseudomallei
tctcgtgttgttggggcgcgagccctgtggggaggaaactctctaacgtttgcccgttcaagtccttctggacgcgtcgggataggcgggttccgcgagaacggaacccggtgag

SEQ ID NO: 16549 - RNA, 119 nt, unidentified
  source 1..119: mol_type = other RNA; note = Related to NZ_LOVC01000028.1; note = Burkholderia ubonensis
tcgtgttggttggggcgatagccccgtggaggggaaactctctaacgtatgcctcgccttgaagtctgtgaaacggtggggatgggggttccggcgagaccggaacccgttgaaatagg

SEQ ID NO: 16550 - RNA, 132 nt, unidentified
  source 1..132: mol_type = other RNA; note = Related to NQMK01000010.1; note = Pusillimonas sp.
tcgcggttgtgagggcttcggccctgtggagacttaggtctctgtccattcccgcgtctgtcggctgtcgacgacactgcacgggccaggggatagccgttttcggcgagaggccgaaaacgggtgatttgg

SEQ ID NO: 16551 - RNA, 151 nt, Achromobacter sp.
  source 1..151: mol_type = other RNA; note = Related to CADIJU010000003.1; note = Achromobacter marplatensis
tcgcggttgtgggggtttcggccccgtggaggcttcggcttctgcccattcccgcgtctggcagctggcggtgctccgtcatggatgacgacatgctgcagaggcgaggggataagccgttttcggcgagaaccgaaaacgggtgattagg

SEQ ID NO: 16552 - RNA, 147 nt, Achromobacter sp.
  source 1..147: mol_type = other RNA; note = Related to CADIKQ010000001.1; note = Achromobacter mucicolens
tcgtggttgtaggggctccagccccgtggagactttggtctctgctcattcccgtctcgatctgctccagcgccgctccttcacggacgacgactggggcatggggggatagccgttttcggcgagagccgaaaacgggtgatttgg

SEQ ID NO: 16553 - RNA, 162 nt, Alcaligenes faecalis
  source 1..162: mol_type = other RNA; note = Related to MSZO01000007.1
tcgcagtagtgggggcttcggccccgcggagattcgtctctaccctttctcttgccaggcttcggtctgcgccctgctgcagtgatgtagtcagtgacgcgtgacacgcagttctccaggggataagccgttctcaacgagatgtgagaacggatgatatgg

SEQ ID NO: 16554 - RNA, 145 nt, unidentified
  source 1..145: mol_type = other RNA; note = Related to CP062062.1; note = Janthinobacterium sp.
ttgctgttttgagagcttcggctctgtggaggcttgcctctaacacttccataacctcgaaccgcggtctttcaacacgaacgactacgacacgggactggggggaaagtctgcttctggcgagagccagaagcagttgataggt

SEQ ID NO: 16555 - RNA, 151 nt, unidentified
  source 1..151: mol_type = other RNA; note = Related to RDZZ01000077.1; note = Polaromonas sp.
tcgcgatttggggacttagcaataagttctgtggaagcgaaagcttctaacctctccccagcagcaggttggcggcacggcttcacggtcgatgttcttcatgcagtgcggggatagtccggtttggcgagaaccaaaccggtgttttagg

SEQ ID NO: 16556 - RNA, 115 nt, unidentified
  source 1..115: mol_type = other RNA; note = Related to NZ_JQKD01000066.1; note = Xenophilus azovorans
tcgcgattggtggagtgaaagctccgtggaggcgcaagcttctaatccgtcccatgcgtgtctttccggttgcaggggataggcgcgtcggcgagagcccgacgcgttaatcgag

SEQ ID NO: 16557 - RNA, 147 nt, Achromobacter sp.
  source 1..147: mol_type = other RNA; note = Related to CADIJW010000048.1; note = Achromobacter dolens
tcgtagcatcgggggcttcggtcccgcgggggtgtcaaagcccctacccaatcccagaccagacggacggacgcggcctcaccgccacgactctccggcaggcaggggatagccgagtccggacgagaaccggactcgggtaactgg

SEQ ID NO: 16558 - RNA, 144 nt, unidentified
  source 1..144: mol_type = other RNA; note = Related to JAECRL010000003.1; note = Burkholderiales bacterium
tcgtagcaatggaggcttaggcctcgtgggggcgaaagctcctatccaatcccagaccagacgggtgggcacgggctctcgggcacgtctctccggcaggcaggggataaccgagtccgacgagagccggactcgggtaacagg

SEQ ID NO: 16559 - RNA, 122 nt, unidentified
  source 1..122: mol_type = other RNA; note = Related to NZ_JABBFW010000053.1; note = Azohydromonas caseinilytica
tcgcagtagttggagcttcgtctccgcggaggttgatagcctctaccacttctcctaaggtccggcccggcccggcccacggggatagtcggatccgacgagaggcggatccgtgtaaagag

SEQ ID NO: 16560 - RNA, 144 nt, Pseudomonas sp.
  source 1..144: mol_type = other RNA; note = Related to NZ_MLEM01000008.1; note = Pseudomonas syringae
tcgattgcttgtaggtgctacagcactgcggaggttgattttttggacctctaacttttggaccgggcgtgtgcggtcgtcaccgtatgcgtatgtagtgcggtcttgtaggcttcgtcgagacgtcgaagcctggtgatttca

SEQ ID NO: 16561 - RNA, 142 nt, Pseudomonas fluorescens
  source 1..142: mol_type = other RNA; note = Related to JAEKIK010000020.1
tcgattgcttgtaggtgctacggcactgcgggggttgattttggacctctaacttttgggccgggcgtgtgcggtcgtcaccgtgcgcgtatgtggtgcggtcttgtaggcttcgtcgagacgtcgaagcctggtgatttca

SEQ ID NO: 16562 - RNA, 142 nt, Pseudomonas sp.
  source 1..142: mol_type = other RNA; note = Related to NZ_CP018420.1; note = Pseudomonas veronii
tcgattgtttgtaggtgctaaggcactgtgggggttgattttgaacctctaaattttgggccgggcgtgtgcggtcgctaccgtgcgcgtatgtggtgcggtcttgtaggcttcgtcgagacgtcgaagcctggtgatttca

SEQ ID NO: 16563 - RNA, 140 nt, Pseudomonas sp.
  source 1..140: mol_type = other RNA; note = Related to CP004061.1; note = Pseudomonas aeruginosa
tcgattgctgttggtgctccggcaccgtggaggcttcggtctctaaattttggcaccgacgcgcccatcgcagtccatcgcgggtcacggccgtccagcctagtcggcatcgtcgagagcgacgatgcctggtggtttca

SEQ ID NO: 16564 - RNA, 132 nt, Pseudomonas sp.
  source 1..132: mol_type = other RNA; note = Related to LN831024.1; note = Pseudomonas aeruginosa
tcgattgctgttggtgcttcgacaccgtggaggccttgagtctctaatttttggccccgacgtggcgcgtggtatcgcgtgtgtcatcggatcggcctagtcaggcttcgtcgagagcacgaagccaggtgg

SEQ ID NO: 16565 - RNA, 140 nt, Pseudomonas fluorescens
  source 1..140: mol_type = other RNA; note = Related to CP031450.1
tcgattgttgttggtgcatagcaccgtggaggctttagcctctaacccttgggcggcacactcggcgtacgtcgtgatctacgcgtatcaccggtgcgtaccgacctagtcaggcttcgtcgagactcgaagccaggtga

SEQ ID NO: 16566 - RNA, 147 nt, Pseudomonas sp.
  source 1..147: mol_type = other RNA; note = Related to JAIZEG010000001.1; note = Pseudomonas aeruginosa
tcgattgttgttagcgtgaaaacgctgtggggatttcggtccctgacccttgggcccggcgtgcggcgaggcgtagcgatctgcgcatccatccggcgtcacggcatagtcaggcgtcgtcgagaaacacgacgcctggcgatttca

SEQ ID NO: 16567 - RNA, 142 nt, unidentified
  source 1..142: mol_type = other RNA; note = Related to NZ_BDMN01000231.1
tcgaagcaattagagtctttagctctgcggaggcaatgcctctaaaccatttttcgtgcaacattcaggtcgatacccttgtggtaatccatcactagcatgagatagccgctttcggcgagaccgaaagcgggtaattcag

SEQ ID NO: 16568 - RNA, 141 nt, unidentified
  source 1..141: mol_type = other RNA; note = Related to NZ_BLYC01000085.1
tcgaggctattagagcattagctctgtggagacactgtctctgaccatttttcgtgcaacattcaggtcgatacccttgaatgtcatccatcaccagcatgagatagccgctttcggcgagaccgaaagcgggtgattcag

SEQ ID NO: 16569 - RNA, 143 nt, Pseudomonas sp.
  source 1..143: mol_type = other RNA; note = Related to JAJHPU010000021.1
tcgttgctgttagtgcattgcactgtggagacccctggtctctgtcccttggtcgcacagagggccgcgtgcgtcgcgttatgcatgtacgccacctcgcgacataagcggcttcgtcgagagacgaagccggtgtcttcgga

SEQ ID NO: 16570 - RNA, 124 nt, unidentified
  source 1..124: mol_type = other RNA; note = Related to SCRP01000034.1; note = Paraburkholderia sp.
tcgttgctgttgaggcttcgcctcgtggaggggtaactctctaacacgtcccttcgcttcgcctctggcgaacgatatgaggggatagctgcttccggcgagagccggaagcaggtgactagga

SEQ ID NO: 16571 - RNA, 135 nt, Pseudomonas sp.
  source 1..135: mol_type = other RNA; note = Related to JACYWI010000012.1; note = Pseudomonas syringae
ttgatagtgtttggcagcacttgtggctgtcgtggaggatttataccctctgttccccgtgcctgcgcggatcggtgccctcgggctaccacgttcccgtcagggctgtgcgtcgtcgagagcgacgcacagtgg

SEQ ID NO: 16572 - RNA, 135 nt, Pseudomonas sp.
  source 1..135: mol_type = other RNA; note = Related to CP045551.1; note = Pseudomonas putida
tcgattgtgtttggcagctcttgtggctgtcgtggaggagttaaatcctctgtcccccgtgcctgcgcggatcggtaccctcgggttaccaagttcccgtcagggctgtgcgtcgtcgagagcgacgcacagtgg

SEQ ID NO: 16573 - RNA, 141 nt, Pseudomonas sp.
  source 1..141: mol_type = other RNA; note = Related to WIVT01000008.1; note = Pseudomonas helleri
ttgagtgtatttggtggacgtgagtctatcgtggaggtatcaacctctaaccccatgcctgcacgcatccggtccctcgtgggtatcccgggtggctgccagggctgtgcgtcgttgagacgcgacgcacagtggctctta

SEQ ID NO: 16574 - RNA, 120 nt, unidentified
  source 1..120: mol_type = other RNA; note = Related to JACXXJ020000005.1; note = Agrobacterium vitis
ccgtctatgtgtggggccggaggccctgtggggatgtaaatccccgattcaatcctgcgtctggctagggaccgcggcacgcgcgccgcacccggcgggctcgggtgcggcatgttcgag

SEQ ID NO: 16575 - RNA, 118 nt, unidentified
  source 1..118: mol_type = other RNA; note = Related to CP081837.1; note = Agrobacterium vitis
ccgtcaatgtgtggggccggaggccctgtggggatgcaagtccccgattcaatcccgtgtctggcagggaccgtggccgcgcgccgcacccgtcgggcccgggtgcggcatgttcgag

SEQ ID NO: 16576 - RNA, 119 nt, unidentified
  source 1..119: mol_type = other RNA; note = Related to JAAMDS010000038.1; note = Agrobacterium rhizogenes
ccgtcaatatgtggggccggaggccctgtggggatgaaaatccccgactcaatcccgtcgtctgctggggaccgtggccgcgcgccgcacccgtcgggcccgggtgcggcatgttcgag

SEQ ID NO: 16577 - RNA, 117 nt, unidentified
  source 1..117: mol_type = other RNA; note = Related to NZ_NNRJ01000027.1; note = Brucella thiophenivorans
ccgtctatatgtggggccggaggccctgtggggattagtccccgtctcaatcctgcgtctgccgggacccgtggcctcgcgccgcacccgtcgggcaccaggtgcggcatattcgag

SEQ ID NO: 16578 - RNA, 122 nt, unidentified
  source 1..122: mol_type = other RNA; note = Related to NZ_PVWU01000025.1; note = Rhizobium pusense
ccgtcgatgtgtggggccggaggccgtgtggagacctggtaggtctccgactcaatcccgtcgtctggcaggggccgtggccgcgcgccgcaccctccgggctcgggtgcggcatattcgag

SEQ ID NO: 16579 - RNA, 121 nt, unidentified
  source 1..121: mol_type = other RNA; note = Related to JACDJD010000002.1; note = Rhizobium leguminosarum
ccgtcgatgtgtggggccgatggccctgtgggggtgtttacatccccgattcaatcccgtctctggcagggaccgtggcccgcgcgccgcaccctccgggctcgggtgcggcatattcgag

SEQ ID NO: 16580 - RNA, 119 nt, unidentified
  source 1..119: mol_type = other RNA; note = Related to FZNM01000001.1; note = Paracoccus sediminis
ccgtcttgagttggggccgtgagccctgtggaggccgatggtctccgtctcaatcccgtagctggcagggaccgcggacgagcgccgcacccgctgggcacgggtgcggcatgttcgag

SEQ ID NO: 16581 - RNA, 120 nt, unidentified
  source 1..120: mol_type = other RNA; note = Related to JASG01000004.1; note = Sulfitobacter guttiformis
ccgtctggagttggggccatgagccctgtggagaccaatggtctccgtctcaatcccgttcgtcggcagggaccgcggcagcgcgccgcacccgctgggctcgggtgcggcatgttcgag

SEQ ID NO: 16582 - RNA, 120 nt, unidentified
  source 1..120: mol_type = other RNA; note = Related to NZ_SPUW01000001.1; note = Pseudooceanicola onchidii
ccgtcttgagttggggccttgagccctgtggagaccgatggtctccgattcaatcccgtttaccggcagggaccgcagccgcgcgccgcacccgctgggcacgggtgcggcatgttcgag

SEQ ID NO: 16583 - RNA, 120 nt, unidentified
  source 1..120: mol_type = other RNA; note = Related to NZ_QRBG01000022.1; note = Cereibacter sphaeroides
ccgtcttgagttggggccgtgagccctgtggaggcgtcaagcctccgttccactcccgagccggcagggaccgcggccacggcgccgcacccgcccgggtccgggtgcggcatgttcgag

SEQ ID NO: 16584 - RNA, 116 nt, unidentified
  source 1..116: mol_type = other RNA; note = Related to NZ_APLP01000010.1; note = Agrobacterium tumefaciens
gtccaatgtgttggggcttcggccctgtggaggcctcaaaacctccgtctcactcccaggtctggcggggggcgcgcgcgtccgcacccgtcgggcccgggtgcggcatattcgag

SEQ ID NO: 16585 - RNA, 118 nt, unidentified
  source 1..118: mol_type = other RNA; note = Related to NZ_AP023278.1; note = Agrobacterium vitis
ccgtccgatgtgtggggccgtaggccctgtggaggccttaaacctccgtctcactcccgtgtctggctggggggcgcgcgcgtccgcacccgtcgggcccgggtgcggcatattcgag

SEQ ID NO: 16586 - RNA, 120 nt, unidentified
  source 1..120: mol_type = other RNA; note = Related to CP033022.1; note = Agrobacterium sp.
ccatcaatatgtggggccacagagccctgtgggggcgcaagcctccaattcacttccgatggctggaaggggacggcagcgcgccgcacccggtagggcttcgggtgcggcatatcgagg

SEQ ID NO: 16587 - RNA, 119 nt, unidentified
  source 1..119: mol_type = other RNA; note = Related to CCRK01000005.1; note = Neorhizobium galegae
ccatcaatatgtggggccttagagccctgtggaggtgcaaacctccaattcacttccgacggctggaaggggacggcacgcgccgcacccggtagggcttcgggtgcggcatatcgagg

SEQ ID NO: 16588 - RNA, 120 nt, unidentified
  source 1..120: mol_type = other RNA; note = Related to NZ_AP025032.1; note = Aureimonas sp.
ccgtctaaatgtggggcctggagccctgtgggaacgcagtgttcccgtttcaatcccgtgtctggcagggaccgtggccgcgcgccgcacccgtcgggctccgggtgcggcatattcgag

SEQ ID NO: 16589 - RNA, 119 nt, unidentified
  source 1..119: mol_type = other RNA; note = Related to MEEU01000016.1; note = Pelagibacterium sp.
ccgtcgaagtgtggggcctggtgccctgtgggagcctagtgttcccgtctcaatcccgtgtctggcagggaccgtggcgcgcgccgcacccgtcgggctccgggtgcggcatattcgag

SEQ ID NO: 16590 - RNA, 121 nt, unidentified
  source 1..121: mol_type = other RNA; note = Related to JADCRT010000002.1; note = Methylobacterium mesophilicum
ccgtcgatgtgttggggccggaggccctgtggggatcttcggattcccgattcaatcccgtctctggctgggaccgcggcacgtgccgcacccgccgggcaacgggtgcggcatgttcgag

SEQ ID NO: 16591 - RNA, 122 nt, unidentified
  source 1..122: mol_type = other RNA; note = Related to VFMG01000001.1; note = Bosea sp.
ccgtcgaagtgttggggcctggagccctgtgggagctttatgctcccgtctcagatccggcgtctggatgggaccgtggccgcgcgccgcacccgccgggcttcgggtgcggcatattcgag

SEQ ID NO: 16592 - RNA, 118 nt, unidentified
  source 1..118: mol_type = other RNA; note = Related to JACEMU010000004.1; note = Paracoccus sp.
ccgacaaaggctggggccggaggccctgtgaaggcttagcgccttcgactcgttcctgcgtctctggctggaccgtggcagcgcgccgcgcccgcccggggccgggcgcggcatgtaa

SEQ ID NO: 16593 - RNA, 116 nt, unidentified
  source 1..116: mol_type = other RNA; note = Related to NZ_WQCG01000003.1; note = Ruegeria atlantica
ccgacaaaggctggggccagaggccctgtgaaggcttagagccttcgtctagttcctgtgtctctggatggaccgtggcagcgcgccgcgcccgcccgggaccgggcgcggcatgg

SEQ ID NO: 16594 - RNA, 118 nt, unidentified
  source 1..118: mol_type = other RNA; note = Related to CP002623.1; note = Roseobacter litoralis
ccgacgagaactggggccagaggccctgtgaaggcttagagccttcgtctctcacctgcgtctcggcacgggggatggccgcgcgccgcaccccaccggggttgggtgcggcatgtaa

SEQ ID NO: 16595 - RNA, 118 nt, unidentified
  source 1..118: mol_type = other RNA; note = Related to NZ_CP045393.1; note = Roseovarius sp.
ccgacgagaactggggccagaggccctgtgaaggcttagcgccttcgactctcacctgcgtctcgggatgcggggtggccgccggccgcacccatccgggattgggtgcggcatgtaa

SEQ ID NO: 16596 - RNA, 117 nt, unidentified
  source 1..117: mol_type = other RNA; note = Related to CP059262.1; note = Exiguobacterium profundum
ccgacgcgaactggggccagtggccctgcgaggccaagagccttcgactcacacctgcgtctcggggtgggggctggccgcgcgccgcacccatccggggttgggtgcggcatgtaa

SEQ ID NO: 16597 - RNA, 120 nt, unidentified
  source 1..120: mol_type = other RNA; note = Related to JACESO010000004.1; note = Sphingobium sp.
ccgtcgaagtgtggggcctggagccctgaggaggcatattgcttccgatatcaatctcgtggctggtcgggaccgtggcgtgcgccgcacccgtcgggctccgggtgcggcatgttcgag

SEQ ID NO: 16598 - RNA, 119 nt, unidentified
  source 1..119: mol_type = other RNA; note = Related to FOFL01000001.1; note = Devosia sp.
ccgtctaagtgtggggcctagagccctgtggaagcttcggcttccgtcaacctcgtcgtctctcagggccgtggcgcgcgcgccgcacccgtccgggcgccgggtgcggcatattcgag

SEQ ID NO: 16599 - RNA, 122 nt, unidentified
  source 1..122: mol_type = other RNA; note = Related to NZ_FPKU01000001.1; note = Devosia enhydra
ccgtctatcgttggggcctctggccctgtggaggcgtgaaagcctccaattcaatcccgacgaccggtagggagcgaggccgcgcgccgcacccgcccgggatcgggtgcggcaaattcgag

SEQ ID NO: 16600 - RNA, 116 nt, unidentified
  source 1..116: mol_type = other RNA; note = Related to WRPF01000034.1; note = Caulobacteraceae bacterium
acgcatactggggccttgagccctgtgagaagcttagcttctcgaccaccgtccgcgtgtgcagggatgtcggtgcctcggtgccgcgccctcaggccgggcgcggcctattaggg

SEQ ID NO: 16601 - RNA, 119 nt, unidentified
  source 1..119: mol_type = other RNA; note = Related to NZ_LMNU01000047.1; note = Methylobacterium sp.
tcgtcaccagctggggcttcgagccctgtgagaggttaatcctctcgtctacctccttcggcctcagcgggggcggcgccgtgccgcgcccgcccggggccgggcgcggcaatcccgag

SEQ ID NO: 16602 - RNA, 119 nt, unidentified
  source 1..119: mol_type = other RNA; note = Related to CP021181.1; note = Rhizorhabdus wittichii
ccgtcagcagcaggggccacaagccctgtgggaagattgtcttcccgactaccacctgcgtctcggccgggagtggcgctgcgccgcgcccgcccgggaccgggcgcggcaaccccgag

SEQ ID NO: 16603 - RNA, 114 nt, unidentified
  source 1..114: mol_type = other RNA; note = Related to NZ_LDTE01000007.1; note = Sphingomonas sanguinis
ccgtcagaagctggggccaaaagccctgtaaggagaaatccttgactacttcctgtgtctcggcgggggagcggcgcgccgcgcccgcccgggaccgggcgcggcgaccccgag

SEQ ID NO: 16604 - RNA, 119 nt, unidentified
  source 1..119: mol_type = other RNA; note = Related to NZ_AP017898.1; note = Sphingopyxis sp.
ccgtcagaagctggggcctatggccctgtggggagattgtttccccgactaccacctgcgtctcggccgggggtggcgtcgcgccgcgcccgcccgggaccgggcgcggcaaacccgag

SEQ ID NO: 16605 - RNA, 119 nt, unidentified
  source 1..119: mol_type = other RNA; note = Related to CP011344.1; note = Proposed Citromicrobium sp.
ccgtcagaagctggggcctttggccctgtggggagattttctccccgactaccacctgcgtctcggccgggggtggcgtcgcgccgcgcccgcccgggaccgggcgcggcaaccccgag

SEQ ID NO: 16606 - RNA, 116 nt, unidentified
  source 1..116: mol_type = other RNA; note = Related to JAGHQS010000004.1; note = Qipengyuania flava
ccgtcagaagctggggccgctggccctgtggggagattggctccccgactaccacctgcgtctgggcggggtgcggtgcgccgcgcccgcccgggaccgggcgcggcatgcccgag

SEQ ID NO: 16607 - RNA, 119 nt, unidentified
  source 1..119: mol_type = other RNA; note = Related to JADOUC010000001.1; note = Sphingobium sp.
ccgtcagaagctggggccacaagccctgtggggagattgcctccccgactaccacctgcgtctcggcggcggggagcggcgcgccgcgcccgcccgggaccgggcgcggcaagcccgag

SEQ ID NO: 16608 - RNA, 116 nt, unidentified
  source 1..116: mol_type = other RNA; note = Related to NZ_JACBGA010000006.1; note = Sphingopyxis sp.
ccgtcagaagctggggcgaaaagccctgtggggagattgtcttcccgactaccacctgcgtctcggccgggggcggtgcgccgcgcccgcccgggaccgggcgcggcaagcccgag

SEQ ID NO: 16609 - RNA, 120 nt, unidentified
  source 1..120: mol_type = other RNA; note = Related to LMKH01000010.1; note = Sphingomonas sp.
ccgtcagaagcaggggcgatctcaagccctgtgggagaatggttctcccgactaccacctgtgtctcggcgggggggcggcgcgccgcacccgcccgggaccgggcgcggcatgcccgag

SEQ ID NO: 16610 - RNA, 116 nt, unidentified
  source 1..116: mol_type = other RNA; note = Related to JAIZSQ010000047.1; note = Burkholderia vietnamiensis
gcgtagtacctgggcctgcagtgtgaggcctgcggagaggcaactctccaatcattgccccgggccatgtgcctcgggcgccccggccgccgcctggtacggcggccggaaacgga

SEQ ID NO: 16611 - RNA, 117 nt, unidentified
  source 1..117: mol_type = other RNA; note = Related to JAGSTU010000036.1; note = Burkholderia vietnamiensis
gcgtattgcctgggccgctgcgatgggcctgcggagaggaaactctccaacctttgccccgggacgcgtgtctcgggcgcccccggccgccgcctggtacggcggccggaaaacgga

SEQ ID NO: 16612 - RNA, 107 nt, unidentified
  source 1..107: mol_type = other RNA; note = Related to NZ_JAFD01000236.1; note = Burkholderia sp.
gcgtattacctgggcctgctgtcagggcctgcggagaggaaactctccaacctttgcccggtttctgggcgcccggccgccgcctggttgcggcggccggaaacgga

SEQ ID NO: 16613 - RNA, 117 nt, unidentified
  source 1..117: mol_type = other RNA; note = Related to JACZKT010000108.1; note = Rubrivivax sp.
gcgtagtacctggacccgctgtttggggtctgcggagaggcaactctccaaccattgccccggtcacgcgtaccggggcgccccggccgccgcctggtgcggcagccgggagacgga

SEQ ID NO: 16614 - RNA, 129 nt, unidentified
  source 1..129: mol_type = other RNA; note = Related to CP001505.1; note = Burkholderia glumae
tcgtaatgctggccttagggctgtggaggggaaaccctctgacacatcgcggagcgcatggccgatgcgatcggcacggcgggacgcgatggctgtggtgccgcctggaagcggcaccacagttctagg

SEQ ID NO: 16615 - RNA, 128 nt, unidentified
  source 1..128: mol_type = other RNA; note = Related to VCIZ01000019.1; note = Cupriavidus campinensis
cagtttttgacgggcctttgggctgaggaggggaaaccctctaccacctttgcgggcgcaggaccggagacgggacgacgcattgcgaagggacgcgccgccgcctggaacggcggcgcgattcgggg

SEQ ID NO: 16616 - RNA, 118 nt, unidentified
  source 1..118: mol_type = other RNA; note = Related to NZ_MUAV01000008.1; note = Rhodovulum viride
tcctcatacccagcttggactcgttcaagcgcggaggggttttcccctctaccacttctaccgcacacggcccggaggcccccgagggggacgagaggacggcggcgggcgaagcaga

SEQ ID NO: 16617 - RNA, 118 nt, unidentified
  source 1..118: mol_type = other RNA; note = Related to CP046620.1; note = Rhodobacteraceae bacterium 9Alg 56
tcctcatacccagcttggacttgttcaagcgcggaggggttctcccctctaccacttctaccgcacacggcccggagtccccggagggggacgaggggacggcggcgggcgaagcaga

SEQ ID NO: 16618 - RNA, 124 nt, unidentified
  source 1..124: mol_type = other RNA; note = Related to NZ_RWJI01000001.1; note = Sphingorhabdus wooponensis
ttctcatattcagctttgacgttagtccgagcgtggagagcgaaagctctctgacacttcattcgcacaggccgcgatggccccggcgacggggatgcgcggacgacggcgagcgaagcagaga

SEQ ID NO: 16619 - RNA, 151 nt, unidentified
  source 1..151: mol_type = other RNA; note = Related to NZ_JAGGJV010000004.1; note = Rhizobium herbae
tcgtcattttcaggccattctcagaaatgcgaatgccgtggaggaccttcgtgtcctctgatcttacccggacgcccgaggacccgagaggggacggcggcggcgggcgaagcagaagcagtcccgacgagcgggctgcttctaggtagaa

SEQ ID NO: 16620 - RNA, 151 nt, unidentified
  source 1..151: mol_type = other RNA; note = Related to JAGIPO010000002.1; note = Agrobacterium tumefaciens
tcgtcattttcaggccattctcagcgatgagaatgccgtggagggccgctgtgtcctctgatcttacccggacgcccgaggacccgagaggggacggcggcggcgggcgaagcagaagcagccccgacgagggggctgcttctagatagaa

SEQ ID NO: 16621 - RNA, 150 nt, unidentified
  source 1..150: mol_type = other RNA; note = Related to NZ_LMPE01000005.1; note = Rhizobium sp.
tcgtcattttcaggtattcgcatatgcggataccgtggaggacctcgcgtcctctgatcttacccggacgccgggcgacccgagaggggaggccgtggcgggcgggcgaagcagaagcagccctaacgagcgggctgcttctaggtaaaa

SEQ ID NO: 16622 - RNA, 147 nt, unidentified
  source 1..147: mol_type = other RNA; note = Related to JAILYH010000012.1; note = Rhizobium sp.
tcgttattttcaggccattcgcgaaagcgaatgccgtggagggccttcgtgccctctgatcttacccggacgcccgaggagacccgagaggggacgacggcggcgggcgaagcagaagcaaccccgacgagcgggttgcttctaggt

SEQ ID NO: 16623 - RNA, 153 nt, unidentified
  source 1..153: mol_type = other RNA; note = Related to JABDWX010000001.1; note = Rhizobium bangladeshense
tcgtcattttcaggccattcgcgcaagcgagtgccgtggaggaccttcgtgtcctctgatcttacccggacgcccgaggaaggacccgagaggggacgacggcggcggtcggagcagaagcaaccccgacgagcgggttgcttctaggtagaa

SEQ ID NO: 16624 - RNA, 150 nt, unidentified
  source 1..150: mol_type = other RNA; note = Related to VIUA01000006.1; note = Rhizobium sp.
tcgtcattttcaggccattcgcgtaagcgagtgccgtggagggcctttgtgtcctctgatcttacccggccgcccgaggccccgaggaggggacgacgacggcgggcgaagcagaagcaaccccgacgagcgggttgcttctaggtagaa

SEQ ID NO: 16625 - RNA, 140 nt, unidentified
  source 1..140: mol_type = other RNA; note = Related to NZQL01000081.1; note = Hyphomicrobiales bacterium
tcgttatctgaaggtcgggctctattatcccgaccgtggaggggtgaccctctatcacttcccccaagaggccccggtgggacggggaccgacacgggcgaagcagccgcgatcaacgactgatcgcggctagaatgaag

SEQ ID NO: 16626 - RNA, 145 nt, unidentified
  source 1..145: mol_type = other RNA; note = Related to NZ_SJFN01000052.1; note = Siculibacillus lacustris
tcgtttcatccagtaccgccgcaaggcagtacgcggagagggcaacctctctaccgcttatccgccgccaccgggctctcctctgggccgggccgcgacggcgaagcaagatccgccaacgacaggcggatctttggcacttggg

SEQ ID NO: 16627 - RNA, 137 nt, unidentified
  source 1..137: mol_type = other RNA; note = Related to RXIY01000013.1; note = Hyphomicrobiales bacterium
tcgtcatatccagggccgcccatcggcggcccgcggaggaggcaactcctctatcgcttgctggtgtcgagcccggggatgggcgagggccggacggagcaagagccgctacgacgcgcggctctaaggcacttggg

SEQ ID NO: 16628 - RNA, 131 nt, unidentified
  source 1..131: mol_type = other RNA; note = Related to CP055265.1; note = Agrobacterium vitis
tcatcacaccttgaactcttcggagttcgcggaggggtagccctctactgcttatccggcccacggccccggacccccggaggacgatggcgggcgaagcgagacccaggatgaccttgggtctcttggta

SEQ ID NO: 16629 - RNA, 139 nt, unidentified
  source 1..139: mol_type = other RNA; note = Related to WGNU01000009.1; note = Alphaproteobacteria bacterium
tctttaaaccttgggcctttcggggctcgtggaaggagcgatccttctaacgcttgctgggcccacggccccggccgctcgacgaccggtccgcagaccagcgaagcagacacggcgaaagacacgccgtgtctatgca

SEQ ID NO: 16630 - RNA, 145 nt, unidentified
  source 1..145: mol_type = other RNA; note = Related to NC_016587.1; note = Azospirillum lipoferum
gcccattcgctgagtgaatctctcgattcactcgtgggagatatataaatctcctaacatcctgcacgggtggtccggcgacgcggcgacgcggcggcggccgtccgcaggcggcgcggggccggggcaccggccccgcgccggg

SEQ ID NO: 16631 - RNA, 147 nt, unidentified
  source 1..147: mol_type = other RNA; note = Related to NZ_FXAK01000010.1; note = Azospirillum oryzae
acgcccattcactgagtgaaccacatggttcactcgcgggagatgtaaaaatctcctaacatcctgcacgggtggtccggtggcgcggcaacgcggcggcggtcgtccgcaggcggcgcggggccggggcaccggccccgcgccggg

SEQ ID NO: 16632 - RNA, 142 nt, unidentified
  source 1..142: mol_type = other RNA; note = Related to NZ_CP029353.1; note = Azospirillum thermophilum
gcccattcactgagtaagtcatcggacttactcgtgggaggtgttaatgcctcctaacaaactgtggcggtggtgcggcgcggcgacgcggcgacgtccgtccgcagacggcgcggggccaggacattggccccgcgctggg

SEQ ID NO: 16633 - RNA, 123 nt, unidentified
  source 1..123: mol_type = other RNA; note = Related to JABMLM010000386.1; note = Microvirga sp.
ccatcattcactgaggctccatccggagccttgcggaaggcaaacgccttctaccattcggccggttcgtgctgagcgcgcggtccggacgggcgtgcccccgatggcgggggcacgcccgta

SEQ ID NO: 16634 - RNA, 135 nt, unidentified
  source 1..135: mol_type = other RNA; note = Related to RRYK01000010.1; note = Pseudoxanthomonas sp.
tcgcaaacggctgagtgtgatgcactcgaggggatcagatccctacgacatccggcggacgacccggcttatggccgcacgggaaacgtctatccggtcaggtggctgcggcgaaggcacgcagccaaagatgga

SEQ ID NO: 16635 - RNA, 138 nt, unidentified
  source 1..138: mol_type = other RNA; note = Related to NZ_LASZ01000005.1; note = Luteimonas sp.
tcgcaacgacgtgagtgggcaaccactcgtgggacgcaagtcccgacacattcccgaagccatcgtcccgtcatgcccgggcgatccagcgagggggtcaggtggctgcgtcgtgaggccgcagccaagtggtcagag

SEQ ID NO: 16636 - RNA, 127 nt, unidentified
  source 1..127: mol_type = other RNA; note = Related to LR990730.1; note = Xanthomonas hydrangeae
tcgcaaacagttgggccgcaaggcctgtggaggcaattgcctctaaccgctccagcccagcggcgattcggtcttccggctcgtcgacggaacggagggacgatgagcgacgcgcggcgtgaccgga

SEQ ID NO: 16637 - RNA, 174 nt, unidentified
  source 1..174: mol_type = other RNA; note = Related to NZ_CP061930.1; note = Klebsiella michiganensis
acgccatcaattgggcatttatgtccgtggaaagcttacgctttctaacatttaccccgcgcaacgcctcagggcctcgcagcgacactgctcgtaagagtcatcgctggctcagatggtatggcgtatgggtattcgaaccctttgggcgaccaagggttcgtggagcagggg

SEQ ID NO: 16638 - RNA, 157 nt, Escherichia coli
  source 1..157: mol_type = other RNA; note = Related to CP056584.1
tcgccatcaattgggtattttttacccgtggaaagttaacactttctaccgtttaccccgcgcaacgcccctgccagcgacaagagtcacaggaccaggtggtatggcgtatgggaattcgaaccctttgggcgacaaagggttcgtggagcaggga

SEQ ID NO: 16639 - RNA, 167 nt, Enterobacter sp.
  source 1..167: mol_type = other RNA; note = Related to NZ_JAIFPH010000003.1; note = Enterobacter hormaechei
tcgccatcaattgggtattgattacccgtggaaagcagatgctttctaacctttaccccgcgcaacgcccctgagcgacgcagctcgcgagagtcatcgtatgtccaggtggtatggcgtatgggtattcgaaccctttgggcgaccaagggttcgtggagcagggg

SEQ ID NO: 16640 - RNA, 157 nt, Escherichia coli
  source 1..157: mol_type = other RNA; note = Related to UGAA01000001.1
tcgccatcaattgggtatttattgcccgtggaaagctaatgctttctaacatttaccccgcgcaacgcctctgtcagcgacaggagtctctgattcaagcggtatagcgtatgggtattcgaaccctttgggcgacaaagggttcgtggagcaggga

SEQ ID NO: 16641 - RNA, 170 nt, Enterobacter sp.
  source 1..170: mol_type = other RNA; note = Related to CP074170.1
tcgccaccaattgggccttaattgcccgtggaaagcttcggctttctaaaatttaccccgcgcaacgcctctgtgcgcctgagcggctcgtgagagtcaccactggtccagatggtatcgcgtatgggtattcggaccccttgggcgaccaagggtccgtggagcagggg

SEQ ID NO: 16642 - RNA, 156 nt, Escherichia coli
  source 1..156: mol_type = other RNA; note = Related to CP023960.1
tcgccatcaattgggtaactttacccgtggaaagttaacgctttctaacatttaccccgcgcaacgcccctgccagcgacaagagtcacaggatcaggcggtatggcgtatgggtattcgaaccctttgggcgaccaagggttcgtggagcagggg

SEQ ID NO: 16643 - RNA, 172 nt, unidentified
  source 1..172: mol_type = other RNA; note = Related to NZ_WUBS01000011.1; note = Acerihabitans arboris
ccgccatcaattgggttaatagcccgaggaaagctttgtgctttctaccatttatcccgcgcaacgcccctgtcggctgtggtgtcctcggaaagctgggtcatcgtagagtaggtggtatggcgcatgggtattcgaagcattgggcgaccaatgcttcgtggagctggga

SEQ ID NO: 16644 - RNA, 154 nt, Escherichia coli
  source 1..154: mol_type = other RNA; note = Related to CP010122.1
tcgtcatcaactgagttgtaaaactcgcggaaagcttaaccgctttctacctatttacccccacgcatggctcctgacgcctccgggcagtactggcagcatagcatgatgggtattcgaaccctctgggcgacagagggttcgtggagcgggg

SEQ ID NO: 16645 - RNA, 208 nt, Vibrio sp.
  source 1..208: mol_type = other RNA; note = Related to MCYV02000002.1; note = Vibrio splendidus
ccgccacttattgaacattcgtgttcgaggaaagtttaggctttctaccatatttcccccatgcctcgctctcaacaaccctgtgccatcaggtgccttgaacagccatacggttgaacattgcaatctggataaatcagtagaattgaatagcatggacatgatgggaattcgcacttttgggcgaccaaagtgcgtggaaccgggg

SEQ ID NO: 16646 - RNA, 205 nt, Vibrio sp.
  source 1..205: mol_type = other RNA; note = Related to PIFL01000078.1; note = Vibrio splendidus
ccgccacttactgagcattcgtgctcgaggaaagtttaggctttctaacattttcccccatgcctcgctatcaaccccctgtgctatcaggcgccttggacaacttacggttgcacatcgctatctagataggtcagtagaattgaaaagcatggacatgaagggaattcgcacttttgggcgaccaaagtgcgtggaaccgggg

SEQ ID NO: 16647 - RNA, 153 nt, Vibrio sp.
  source 1..153: mol_type = other RNA; note = Related to VTLM01000009.1; note = Vibrio cholerae
acgccattaactgagatacttaggtactcgtggaaagtgtaaatactttctaacaacttcccccacatgccccgtcgctccaccgcgtgtgttgcatgacatggacatggggaattcgcgactttggggcgacccaaagtcgcgtggaacggg

SEQ ID NO: 16648 - RNA, 149 nt, unidentified
  source 1..149: mol_type = other RNA; note = Related to NZ_CP035690.1; note = Grimontia hollisae
tcgccatcaactgaacatacaatgttcgtggaaagacgaagttctttctaacattttcccccatgcctggtcgcttcatcactgatgatgcatgacatgacatgaaggaattcgcaactttggggcgacccaaagttgcgtggaacggg

SEQ ID NO: 16649 - RNA, 148 nt, unidentified
  source 1..148: mol_type = other RNA; note = Related to NZ_CP058958.1; note = Providencia rettgeri
tcgccattaattgaatatttcggtattcgcggaaagacttgtctttctacctacttcccgcatgcctagtcgcttcacggttgtgttgcatgacatgaacatgatggaattcgcaactttggggcgacccaaagttgcgtggaacggg

SEQ ID NO: 16650 - RNA, 171 nt, Vibrio sp.
  source 1..171: mol_type = other RNA; note = Related to NZ_CP054700.1; note = Vibrio alginolyticus
tcgccatcaactgagtgcaaactcgaggaaagtttcggactttctgccttttcccccgtgcgtgttcccttcgccgtcgcttgatgttcatcatcaggttgctggataagactgagaacgaaagcgcgggcgggtttcgaacctttgacgaacaaggttcgtgaaatggga

SEQ ID NO: 16651 - RNA, 144 nt, unidentified
  source 1..144: mol_type = other RNA; note = Related to NZ_LTYZ01000001.1; note = Aliivibrio fischeri
tcgccatatattgagtgtttacactcgtggaaagtttactttctgactttttcccccacatgtccgttcgtctcgcctcgcgcctgatgacatcaacatgtaaggaattcgcaatcttggcgagcaagattgcgtggaacggga

SEQ ID NO: 16652 - RNA, 145 nt, Vibrio sp.
  source 1..145: mol_type = other RNA; note = Related to NMSO01000008.1; note = Vibrio metoecus
ccgccactaactggactatgtccgaggaaagagcaatctttctacccttttacccccacatgcttggcttcgttacatcagtgacagcatgaacatgggagggtactcgaaccttttgggcgaccaaaggttcgtcgagacgggg

SEQ ID NO: 16653 - RNA, 148 nt, Vibrio sp.
  source 1..148: mol_type = other RNA; note = Related to PIFP01000042.1; note = Vibrio splendidus
tcgccatatattgagccgtaaggcttgagggaaagcctagctttctaccctattgacccgcacatgactaacagtgacctcgtgagcaccgttcggaacatgtgggaattcgaactttttgggcgaccaaaagttcgtcgagatgggg

SEQ ID NO: 16654 - RNA, 151 nt, Vibrio sp.
  source 1..151: mol_type = other RNA; note = Related to CP073273.1; note = Vibrio fluvialis
tcgtcacttattgagcttatttagctcgtgggaaaacgaaagttttctgcctttttgacccatacatgcctagcagtgaccatgatgagcaccgttcagaacatgtgggaattcgaaccttgggacgaaaccaaggttcgtcgagacgggg

SEQ ID NO: 16655 - RNA, 158 nt, unidentified
  source 1..158: mol_type = other RNA; note = Related to JADZHF010000006.1; note = Shewanella algae
tcgccaccaacttgggcttagcttttaaagtaggctcgtgggaaagcaattgctttctaccttttatacccagacatgcctgccgtagctcgatgagggacgcgcgtagaacatgtgggaactcgagccctaggcgacctgggctcgtcgaaacgggg

SEQ ID NO: 16656 - RNA, 165 nt, unidentified
  source 1..165: mol_type = other RNA; note = Related to AXZL01000070.1; note = Shewanella decolorationis
acgccataaattgaactctgctttggcagggagttcgtgggaaagcgaaagctttctgcctgttaacccagacatgcctgccgtcctaccgtcgctcgacgagagacacgcgcggtacatgtgggaactcgaaccttcgggcgaccgaggttcgtcgaaacgggg

SEQ ID NO: 16657 - RNA, 154 nt, unidentified
  source 1..154: mol_type = other RNA; note = Related to NC_006371.1; note = Photobacterium profundum
tcgccaaaaaatgagttaactttttgttactcgagggaaattttatttcctacctatttcccccatgcacgtctctttacggctacggctgcagctagacattaacatgagagggtatcgcacccagaggcgactctgggtgcgtggaacgggg

SEQ ID NO: 16658 - RNA, 153 nt, Aeromonas salmonicida
  source 1..153: mol_type = other RNA; note = Related to NZ_CP060032.1
tcgtcatgtgtttgagctatttattttgctcgcgggaaatttcggtttcctaaattctccacgcgcttcgcctgccaccggtcctggaccatggcgcggcatcaacgtgaggggactcgcgaattggggcgacccaattcgcgtggaacgggg

SEQ ID NO: 16659 - RNA, 151 nt, Aeromonas sp.
  source 1..151: mol_type = other RNA; note = Related to JAEHHN010000014.1; note = Aeromonas caviae
gcctactacatagagcgttacgctctgggagacgattgtttcctaaattctccacgcgcctgcctgtgtccccatcctcgcgatgcggtcatgcggcgatcacgtgatggggactccgcgaacaggggcgaccctgttcgcgtggaacggg

SEQ ID NO: 16660 - RNA, 180 nt, unidentified
  source 1..180: mol_type = other RNA; note = Related to LXEX01000068.1; note = Obesumbacterium proteus
cagttttacatgagtagatttacgaatttactcgcggaggattttatcctctacatagttacccccacctgatgacgttggctccgtagctaatcttatcgctgtgtaacgtagtgttgcgcatgtaagggtcgagggtattctgattgtggtggcgacaccacaatcagattgaaaagg

SEQ ID NO: 16661 - RNA, 152 nt, unidentified
  source 1..152: mol_type = other RNA; note = Related to NZ_CP031727.1; note = Cellvibrio sp.
tcgccatcgcctgagtttgatgtattggaactcgcggagagcttgctctctaccaattacccgcccaagcagcgttaggccttatacgcttatccagcatggcagcgagtacacacccgtaggggcgaatccctacgggtggaaaacaaggg

SEQ ID NO: 16662 - RNA, 157 nt, unidentified
  source 1..157: mol_type = other RNA; note = Related to NZ_CP047970.1; note = Cobetia pacifica
ccatcgtaattgagcaagtttagtttcttgctcgtggaggtatgacctctaccctttacccccgcagatgtccggccaactatcagttatggcggcctacgtagatgctgggaacatcacaccgtgtgtgcgactgcacacggtgtgggaaataggg

SEQ ID NO: 16663 - RNA, 135 nt, unidentified
  source 1..135: mol_type = other RNA; note = Related to JWLZ01000077.1; note = Photobacterium gaetbulicola
tcgccactatttgagtgtttacactcgaggaaaatcttttgattttctgccatttacacccgcacgctccgtccacctatgtgacatgtccgtgagggatgcagacgctggcgagctagcgtctgaagactaggg

SEQ ID NO: 16664 - RNA, 164 nt, unidentified
  source 1..164: mol_type = other RNA; note = Related to NZ_LS483452.1; note = Shewanella benthica
tcgccattacattgaatgcttgcattcgtggagaactaataattctctaacatttacccccgcacaacgtcctgctcgcctcgaccttctggtacgtgatgaacaataagtggcatgtggggggactcggatacggtgcgagcgccgtatccggaaaactaggg

SEQ ID NO: 16665 - RNA, 158 nt, unidentified
  source 1..158: mol_type = other RNA; note = Related to MZ568827.1; note = Shewanella phage vB_SspS_MuM16-1
tcgccataacaagtgcctgcttttaatttggggcgtggagaagaaattctctaacattttgaccgccgcacgatgcccagcagctcatgtagttctgcatcgggatcacgtgggggggactcggctacggggcgagctccgtagccggaaaactaggg

SEQ ID NO: 16666 - RNA, 150 nt, unidentified
  source 1..150: mol_type = other RNA; note = Related to NZ_KB905161.1; note = Colwellia piezophila
ccatttagaactgaatgcttgcattcgaggagaatcttgaattctctaacctttttcccccacatgtgctcatcagataacttaacttaactatgtagcaagattggtaggggacacacaccgcgggcgaacccggtgtgtaaaacgagg

SEQ ID NO: 16667 - RNA, 139 nt, unidentified
  source 1..139: mol_type = other RNA; note = Related to NZ_KB889976.1; note = Teredinibacter turnerae
ctgttgtagttgagaggtaattctctcgcggaggtcatgagatctctaccttttgccccgcacatgcctgacctcatggttaagcagcgatgcgagagcgagcactctgtggtggcgacgccacagagtgcggaaagga

SEQ ID NO: 16668 - RNA, 169 nt, unidentified
  source 1..169: mol_type = other RNA; note = Related to JABEPJ010000003.1; note = Pseudoalteromonas sp.
aagtgtatattgagtatttatttatactcgtggaaagataatatctttctgacctcttcctgcgcacttcctgctcccccttggaaccttatggtatcaatggtaagtatcgtgaaattaagcgtaggaaggacaacgtggggcgaagaaccacgttgtgaaaatcagg

SEQ ID NO: 16669 - RNA, 173 nt, unidentified
  source 1..173: mol_type = other RNA; note = Related to NZ_JACGUS010000120.1; note = Colwellia sp.
tcgccaagtgtatttgagtatgattttatactcgcggaaagataatatctttctacccttttcctgcgcacttcctgctcccccttggaaccttatggtatcaatcggtaagtatcgtgaaattagcgttgggatagacaacgtggggcgaacccacgttgtgaaaatcaggg

SEQ ID NO: 16670 - RNA, 156 nt, unidentified
  source 1..156: mol_type = other RNA; note = Related to NC_018692.1; note = Alteromonas macleodii
tcgccaaataactggatgttttcggatgtccgtggaaagctttgctttctatcatttccctgcgcacttcctgctacccttgggcttccttggttggtatcgtgataagaccgtaggggccacaccgtgggcgaaaccacggtgtgaaaattaggg

SEQ ID NO: 16671 - RNA, 157 nt, unidentified
  source 1..157: mol_type = other RNA; note = Related to PNDR01000076.1; note = Pseudoalteromonas sp.
tcgccaaccaattgaatacctccgggtgttcgtggaaagcttaagctttctgtctttttccctgcgcaactcctgctacccttggaaatccttggttagtatcgtgagaaatacgtagggtagacaccgtgggcgaaacacggtgtgaaaattaggg

SEQ ID NO: 16672 - RNA, 130 nt, unidentified
  source 1..130: mol_type = other RNA; note = Related to PPSX01000023.1; note = Pseudoalteromonas phenolica
tcgctatcacttttaggcttttgcctgcggagatttatctctaccttttttctgcgaactgttccgttgcttgcaattgtgaatatacgtagagagacgcacgaggcgagaaactcgtgcgtaaaaggga

SEQ ID NO: 16673 - RNA, 145 nt, unidentified
  source 1..145: mol_type = other RNA; note = Related to NVVS02000010.1; note = Halomonas sp.
cactagtttattgagtgggttaccactcgcggagacatagtctctaccttttgcgccgctcatgctgccgggtcacgctagattgatccatcaagcccaagtgtgcgttcacgtcgtggggtgatgccacgacgttaaaacaggg

SEQ ID NO: 16674 - RNA, 148 nt, unidentified
  source 1..148: mol_type = other RNA; note = Related to NZ_AMRJ01000028.1; note = Alcanivorax hongdengensis
caccagtcaattgagtaggttcaacctactcgcggagacgaagtctctatattttgcgccgctcatgcagccgggtcatgctctatcgatccatcaagctcaagtgtgcgtgcacgtcgtgtggtgactacacgacgtgaaagcaggg

SEQ ID NO: 16675 - RNA, 150 nt, unidentified
  source 1..150: mol_type = other RNA; note = Related to JAFMPS010000045.1; note = Alcanivorax sp.
caccagttaactgggtaggctttgtctactcgcggagacttaggtctctaccttctgcgccgctcgtgctacgcgattcatgctccaacgattcatgcagcccaagcgtgcgtccacgtcgtgtggtgacaacacgacgtgaaagcaggg

SEQ ID NO: 16676 - RNA, 146 nt, unidentified
  source 1..146: mol_type = other RNA; note = Related to RZGU01000003.1; note = Legionella sp.
acctgttaattgaatatgtttacatattcgcggagatagagtatctctacttttcgctcggctcatgttgtttgaattgctattgatataccatgaagcacaagcgagtgtccgtcgtgcagtgacatcacgacgggttaataagg

SEQ ID NO: 16677 - RNA, 141 nt, unidentified
  source 1..141: mol_type = other RNA; note = Related to NZ_KB889904.1; note = Marinobacter sp.
tagccaagcaactgagtggaaacactcgcggagaatttattctctaccttactgggccgctagcgtcgtcatgagatcacctgtgatgtaacgtgcgagctgataccacgtgttggcgacaccacgtggtagaaacagggg

SEQ ID NO: 16678 - RNA, 128 nt, Acinetobacter sp.
  source 1..128: mol_type = other RNA; note = Related to NZ_RCHC01000004.1; note = Acinetobacter chengduensis
gcctacctatttgagtatttatactcatggagcttgtctctaactattttgcggctcatgctgtacacgtacagccacaacccgcgaaagcgcgcattcggggcgacacccgaatgcgcgaaagcaga

SEQ ID NO: 16679 - RNA, 121 nt, Acinetobacter sp.
  source 1..121: mol_type = other RNA; note = Related to JAIWSZ010000041.1; note = Acinetobacter baumannii
ccacttaatatgagtgtttcactcatggggagcttccctaacttttttgcggcacaagctgacattcagtagcaaaccgcaagagagtgcgcgccgggcgaccagcgcgcacaaaacaaga

SEQ ID NO: 16680 - RNA, 139 nt, unidentified
  source 1..139: mol_type = other RNA; note = Related to VOBE01000007.1; note = Psychrobacter sp.
tcatgaatattaggtaagttttttacctgcggaggattagaaccctctaccttttgctgggctcatgcgtcctttattcgacgtgttgtaatagttcggtatggtgcttgcttgcgacgagagcaagcaagcacctgtt

SEQ ID NO: 16681 - RNA, 140 nt, unidentified
  source 1..140: mol_type = other RNA; note = Related to AUSW01000014.1; note = Psychrobacter aquaticus
tcatgaatattaggtaagtttttttacctgcggaggattagaatcctctaccttttgctgggctcatgcgtcctttgttcgacgtattgtaatagttcggtatggtgcttgcttgcaatgagagcaagcaagcacctgtt

SEQ ID NO: 16682 - RNA, 141 nt, unidentified
  source 1..141: mol_type = other RNA; note = Related to NWFK02000001.1; note = Psychrobacter sp.
tcattaatattaggtaatattttacctgcggagaattaattttctctacctcttgccgggcacatgcgttctcgactcgacgtatcataatagctcggtatatagtgcttgcttgcgatgagtgcaagcaagcactctgta

SEQ ID NO: 16683 - RNA, 138 nt, unidentified
  source 1..138: mol_type = other RNA; note = Related to NZ_CAJHBG010000001.1; note = Psychrobacter sp.
tcatgaatattaggtaaaattttacctgcggagaattagttttctctacctcctactgggctcatgcgttctcgactcgacgtattacaatggttcggtatggtgcttgcttgcaatgagagcaagcaagcacctgta

SEQ ID NO: 16684 - RNA, 144 nt, unidentified
  source 1..144: mol_type = other RNA; note = Related to NZ_JABUZJ010000058.1; note = Psychrobacter namhaensis
tcatttaatttaggtaactatgttgcctgcggagaatgcaaattctctaactcttgctgggctcatgcgtcaattactcgacgtataataatatctcagtagtgttgttgcttgcgatgagagcaagcaacaaccttgttagga

SEQ ID NO: 16685 - RNA, 146 nt, unidentified
  source 1..146: mol_type = other RNA; note = Related to NZ_CAJHAZ010000027.1; note = Psychrobacter sp.
tcattgttatttaggtatcaattcatacctgtggagaatatttattctctaatcctttcccgggtattgtgaactctacggacacagagagcataataaccgagggttcacactcttgcgatgagcgcaagagtgtggcattggga

SEQ ID NO: 16686 - RNA, 200 nt, Citrobacter sp.
  source 1..200: mol_type = other RNA; note = Related to VHJG01000001.1; note = Citrobacter freundii
tcgcaaaagcttgatggtctgctagtcagccatcgtggaggcttcggcctctattctctccccacacgacgcatgccacacgttctcaatgttccaacgtaacgatgctaacgcatcaccagcgccttggtacatgcagcaacagttggaattgccgggttgtggcgaggggacgtcacacagtgacgtcgaatactggg

SEQ ID NO: 16687 - RNA, 202 nt, unidentified
  source 1..202: mol_type = other RNA; note = Related to NZ_FMBC01000051.1; note = Kosakonia oryziphila
tcgcaaaagcttgatggtctgcttgtcagccgtcgtggaggtttcggcctctaatctctcccccacacgacgcatgccgcgcttacgcagtgttccacgcgttacgatgctacgcatcaccgacgctctggttcgtactgggacagcttggattgctgggattgtggcgagaggacgtcacgctgtgacgtcgaaaactggg

SEQ ID NO: 16688 - RNA, 201 nt, unidentified
  source 1..201: mol_type = other RNA; note = Related to JAFJZU010000002.1; note = Pectobacterium brasiliense
tcgcaaaagcttgatggtctgcttgtcagccatcgtggaggtttcggcctctaatctctcccccacacgacgcatgccacgcttgctcaatgttccaacgttacgatgctacgcatcaccgacgctctggttcgtgccgagacagctgggattgctggatttgtggcgagaggacgtcacgctgtgacgtcgaaaactggg

SEQ ID NO: 16689 - RNA, 201 nt, unidentified
  source 1..201: mol_type = other RNA; note = Related to NZ_JAESHX010000078.1; note = Pectobacterium polaris
tcgcaaaagcttgatggtctgtttgtcagccatcgtggaggccttggcctctaatctctccccacacgacgcatgccacatgttctcaatgttccaacgttatgatgctaacacatcaccaacgctctggtactttctgtaacagttgggattgccgggattgtggcgaggggacgtcacacagtgacgtcgaatactggg

SEQ ID NO: 16690 - RNA, 193 nt, unidentified
  source 1..193: mol_type = other RNA; note = Related to JACETZ010000001.1; note = Pantoea stewartii
tcgcaaaagcttgatggtctgcatagcagccattgtggaggtttatgcctctattctctccccacacgacgcagctgttgctaacttaccgatggttcaggtgtaacgcatccatccatccggtcaatccgtaacggtctgttatgctcgtatcgtggcgagggtgacgtcacatgtgacgtcgaatactggg

SEQ ID NO: 16691 - RNA, 130 nt, unidentified
  source 1..130: mol_type = other RNA; note = Related to CP013653.1; note = Paenibacillus sp.
tcccctaaattggagtgtaacaacactcgcggagtacctttactggtattctaactcttaaaagccgacatgtggttgaccgccaccatgcggcgagccgcgcgctgggagatgcgcgcggcgaaatgaa

SEQ ID NO: 16692 - RNA, 126 nt, unidentified
  source 1..126: mol_type = other RNA; note = Related to NZ_CP040396.1; note = Paenibacillus algicola
tcccaccaactggagtgtttacactcgaggaatacttttaaagtattctaccaaaatagggcaggcgtgtggtgacacccgttcttccccaccgcgcgctgggagctgcgcgcggtgcagaatgaa

SEQ ID NO: 16693 - RNA, 134 nt, unidentified
  source 1..134: mol_type = other RNA; note = Related to JAFYLK010000105.1; note = Clostridia bacterium
tcccctcaattggaactctttgagttcgcggagcagaaatgctctaccccgaggggggcggcatgtgtttggcctgagcggtccgatgctgttcgtcctaccccagcgagcccgccgggatcgggctcgcagaa

SEQ ID NO: 16694 - RNA, 136 nt, unidentified
  source 1..136: mol_type = other RNA; note = Related to NZ_JADCKB010000021.1; note = Ructibacterium gallinarum
tcctctaaattgaagtgtacaatacacttgcggaacacatattgtgttctaccttaaacggggctacatgtagcttgaccagcccaacatggcatgcccgtccgtgcgccacaggagcttgcgcacggttaacaaa

SEQ ID NO: 16695 - RNA, 150 nt, unidentified
  source 1..150: mol_type = other RNA; note = Related to QTZF01000005.1; note = Coprococcus sp.
tcccataaattggagcgcttagcgcttgaggaacattcttaaatgtggatgttctactgttaggggccggcatgttacgcaaagacccgtagcacgctgcaagcaccgcacgctctgcctcgctcggggagctcggcagagctcaaaggg

SEQ ID NO: 16696 - RNA, 145 nt, unidentified
  source 1..145: mol_type = other RNA; note = Related to JAFBIY010000001.1; note = Faecalicatena contorta
tcccataaagtggagtgcaatagcacttgaggagcatctttgcatgctctactgttaggggccggcatgttacgcaaagacccgtagcacgctgcaagcaccgcacgctctgcctcgctcgggaagctcggcagagctcaacgga

SEQ ID NO: 16697 - RNA, 146 nt, unidentified
  source 1..146: mol_type = other RNA; note = Related to NZ_QOHO01000034.1; note = Clostridium indicum
tcccataaattggagtgtatttgcacttgaggagcatcttagtatgctctacggttaggggccggcatgttacgcaatgacccgtggcacgctgctagcaccgcacgctctgcctcgctcgggggagctcggcagagctcaatgga

SEQ ID NO: 16698 - RNA, 144 nt, unidentified
  source 1..144: mol_type = other RNA; note = Related to FCNR01000043.1; note = Eubacteriaceae bacterium CHKCI004
tcccacaaattggagtgcattagcacttgaggagtatcgtatgatactctaccttaaggggccggtatggtacgaagagacccgtagcacaccgcaagcccgcacgctctgccgagctcgggaagctcggcagagctcaaagga

SEQ ID NO: 16699 - RNA, 143 nt, unidentified
  source 1..143: mol_type = other RNA; note = Related to NZ_GL870812.1; note = Clostridium sp.
tcccataaaatggagtgcgtcagcacttgaggagtaccaattgagtactctacagttaggggccggcatggtacgtaaagacccgtggcacgcccgcaccgaacgcatcgccgagctcgggaagctcggcgatgcgcaatgaa

SEQ ID NO: 16700 - RNA, 135 nt, unidentified
  source 1..135: mol_type = other RNA; note = Related to JAFQBX010000034.1; note = Clostridia bacterium
ccccctaatctggagtatgtaaatactcgtggaacatcctatgggtgttctaattagcggggcggcacacgtgttgaccaacgatgtgctgcaccccgcggcttgcccaaggggcttgggcaagccgccaaatta

SEQ ID NO: 16701 - RNA, 136 nt, unidentified
  source 1..136: mol_type = other RNA; note = Related to CP095094.1; note = Flavonifractor plautii
tcccctaaattggagtgtataaacactcgcggaacatcttgaaggtgttctaccccacgggggcggcacacggcttgaccgcccgatgcgccgtcgcccggcatggcccaagccgggagcttgggccatgcccaaa

SEQ ID NO: 16702 - RNA, 143 nt, unidentified
  source 1..143: mol_type = other RNA; note = Related to JAFHCI010000085.1; note = Ruthenibacterium lactatiformans
tcccctaaattggagtgcatgatatgcactcgcggaacatcttcgtggtgttctaccccacggggacggcacacggcttgaccgcccgatgcgtcgccacccgtcatggcccaagccgggcgcttgggccatgaccaaaagaa

SEQ ID NO: 16703 - RNA, 138 nt, unidentified
  source 1..138: mol_type = other RNA; note = Related to JAFWRN010000131.1; note = Clostridia bacterium
tcccctcaactggagtgcattgcactcgcggagcatctttatggtgctctaccctacgggggcggcacatggcttgaccatccgatgcgccgtcacccgcatggcccagccgggaggcctgggccatgcgcaaaggaa

SEQ ID NO: 16704 - RNA, 143 nt, unidentified
  source 1..143: mol_type = other RNA; note = Related to DVNI01000021.1; note = Candidatus Avacidaminococcus intestinavium
tcccctaatctgaagcattattgcttgtgggacaattatatttgtcctaatttctaagggcagcccaagagttcaggccccgtccgactcgtatgcgtccgcagaaacggtcccggctgggatccgggaccgtttaaactgaa

SEQ ID NO: 16705 - RNA, 145 nt, unidentified
  source 1..145: mol_type = other RNA; note = Related to STFG01000036.1; note = Lampropedia sp.
agttgttggagaggtctggatacagacgttgatttgcttgataagcgtatcagcaagacggaggcgggtactaccatccgtctcttcttcgaagagagttagtcgcagggtttggccatggtggatatggctgttgccaacgact

SEQ ID NO: 16706 - RNA, 148 nt, unidentified
  source 1..148: mol_type = other RNA; note = Related to NSLA01000001.1; note = Rubrivivax gelatinosus
agttgttgggcaggtctggaaacagacgtcaatcgagtgctttatgtcgattggctagtggggagacggtcactaccgtccgtctcttcgctcgaagagagttagtcgcagggtttggccatggtggaagtggcagctaccaacgact

SEQ ID NO: 16707 - RNA, 150 nt, unidentified
  source 1..150: mol_type = other RNA; note = Related to JAHUXB010000001.1; note = Comamonas sp.
cgttgttgggtaagtctgtaaaccagacgctgacttgtgcttttgtcgcaggttggcttgtggggaggagggggcaccgtccgcctcttcgcctcgaagagagttagtcgcagggtttggccatgaagggtatggcagttaccaacgact

SEQ ID NO: 16708 - RNA, 148 nt, unidentified
  source 1..148: mol_type = other RNA; note = Related to NZ_LOXM01000118.1; note = Burkholderia ubonensis
agtcattggacattgtctggtaacagacgtcggcgttcgcaggtgatttgccggctttcggggaggggcgactaccgtccgtctcttcgccccgaagagagttagtcgcagggtttggccatgaagggcgtggcggcatccaacgact

SEQ ID NO: 16709 - RNA, 146 nt, unidentified
  source 1..146: mol_type = other RNA; note = Related to NZ_PKPC01000024.1; note = Ralstonia insidiosa
agttgtttggattagtctggaaacggacgtcaatctaatctttgttagatgacttgcggggaggagcggccaccgtccgtctcttcgcctcgaagagagttagtcgcagggtttggccatgaaaggcatggcagcttccaacgact

SEQ ID NO: 16710 - RNA, 150 nt, unidentified
  source 1..150: mol_type = other RNA; note = Related to VIVL01000004.1; note = Variovorax sp.
agttgttagataagagtctggaagcagacgtcagtctatgaagttcatagtctggcttgaggggtgaggggggttaccatccgtcccttcgtcccgaagagagttagtcgcagggtttggccatgatgggtatggcagtagctgacgact

SEQ ID NO: 16711 - RNA, 146 nt, unidentified
  source 1..146: mol_type = other RNA; note = Related to NZ_MRCN01000006.1; note = Variovorax boronicumulans
cgttgttggataagtctggaaacagacgtcgatctataagttcgtagatcggcttgcggggaggagcggccaccatccgtctcttctccccgaagagagttagtcgcatggtttggccatgaagggcatggcaggtgccaacgact

SEQ ID NO: 16712 - RNA, 148 nt, unidentified
  source 1..148: mol_type = other RNA; note = Related to NZ_CP059488.1; note = Acidithiobacillus ferrivorans
agttgttggtgatgctctgaattattagagcgtcttggttcaaaaggatcaaggcttgtcgggaggagtgataccctccgtctcttccatccggaagagagaaggacgttaggcttggccatatgaagggcggttgctaccaacagcc

SEQ ID NO: 16713 - RNA, 151 nt, unidentified
  source 1..151: mol_type = other RNA; note = Related to PDHS01000438.1; note = Candidatus Accumulibacter phosphatis
agtcgttgggcttgctcggaaacgagcgtctaaacgccactcaaaaggcgcctagacaattcgggagagggggggcaccgtccgcctcctccttcggagtagagttggtcggtaggttcagccatgggaagaatggtagctgccaacgacg

SEQ ID NO: 16714 - RNA, 150 nt, unidentified
  source 1..150: mol_type = other RNA; note = Related to SORD01000001.1; note = Janthinobacterium sp.
tatcgccggaaaatgctcgtttacgggcgtcatacagtatgtgctgtgtggcatgtggggagggccgcaagcactctcctctctctcctaacgtcgaggagaggtagttgataggcaaggtcatgggaaaagtggcagttgccggtgata

SEQ ID NO: 16715 - RNA, 145 nt, unidentified
  source 1..145: mol_type = other RNA; note = Related to JACYUQ010000003.1; note = Oxalobacteraceae bacterium
tttcgctggttaggcttggtaacaagcgtcctgtaagcattgcgatcagggctagtggggaggcaggcactctccgtctcctccgaccccgaggagagatggacgataggcttggccatgaggaagatggcagtgtccagcgaaa

SEQ ID NO: 16716 - RNA, 145 nt, unidentified
  source 1..145: mol_type = other RNA; note = Related to WKJJ01000006.1; note = Massilia rivuli
tatcgctggaagatgctcggaaacgagcgctttatggggcgacctgtaaggcacgtggggagggctcgcactctcctctcctctgaccccgaggagagatggacgataggcttggccatgggaaaagtggcagttgccagcgata

SEQ ID NO: 16717 - RNA, 148 nt, Chromobacterium sp.
  source 1..148: mol_type = other RNA; note = Related to NZ_CP029495.1; note = Chromobacterium phragmitis
cattgctagttcgtgctcgtaatgagcgttagctaggcttgcctagctaacttgtcgggagagggcttgcaccctcctctcctccggacccggaggagagagtgacggtagatttagccacgagaaagagtggcagctactagcaatg

SEQ ID NO: 16718 - RNA, 151 nt, unidentified
  source 1..151: mol_type = other RNA; note = Related to NZ_CAJNBE010000044.1; note = Paraburkholderia aspalathi
ggtcgctggacttgctcggtaacgagcgtctgacggcgttgttgctgtcaggcttgtcagaaggaggggtcatactctccgtctccccccgaccgggaggagagtgggacggtaggtttggccatgggaaggatggcagctaccagcgata

SEQ ID NO: 16719 - RNA, 156 nt, unidentified
  source 1..156: mol_type = other RNA; note = Related to NZ_CP012746.1; note = Paraburkholderia caribensis
gaccgctggacttgcctggcaacaggcgttcaacagcacctagtggtgccgttgggcttgtcagaaaggggggctcacactctccgtctcctccggacccggaggagagatggacggtaggtttggccatgggaaggatggcagctaccagcggta

SEQ ID NO: 16720 - RNA, 154 nt, unidentified
  source 1..154: mol_type = other RNA; note = Related to NZ_LPNA01000081.1; note = Burkholderia stagnalis
tgtcgttggcttgagctcggaaacgagcgcttgaagccccaatagggagttcaagctcgtcggtggggggctcacactctccgccccctccgggacccggaggagagaaggttggtaggtccggtcatgggaagagcggccgctgccaacgatg

SEQ ID NO: 16721 - RNA, 145 nt, Pseudomonas sp.
  source 1..145: mol_type = other RNA; note = Related to NZ_AUED01000023.1; note = Pseudomonas vranovensis
gatcctgggttttgctcgtacgagcgtctgaagtttttgactttggacttgtccggaggctcgcacctccgatctcctccgagaaacgtggaggagacagggacggtaggtttggccatgtgaaggatggcagctgccagcgatc

SEQ ID NO: 16722 - RNA, 145 nt, unidentified
  source 1..145: mol_type = other RNA; note = Related to SEFL01000928.1; note = Sphingobacteriales bacterium
gatcctggattttgctcgttatgagcgtctgtagcgtttgcgacaggcttgtccggaggctcgcacctccgatctcctccgaaaaacctggagtagacagagacggtgggtttggccatgtgaaggatggcagctgccagagatc

SEQ ID NO: 16723 - RNA, 144 nt, Pseudomonas sp.
  source 1..144: mol_type = other RNA; note = Related to NZ_BPLZ01000021.1
gatcctggaatttgctcgttacgagcgtctgaagcatagctttgggcttgtccggaggctcgcacctccgatcccctccgaaaaacctggaggagacagggacggtgggtttggccatgtgaaggatggcagctgccagcgatc

SEQ ID NO: 16724 - RNA, 147 nt, Pseudomonas sp.
  source 1..147: mol_type = other RNA; note = Related to NKIG01000020.1
gattctggctttgctctttaagagcgtctacgagattatatatttgtaggcttatgtggaggagccctcgcacctccgccgcctcctacccggaggagcaaggaacggtagatttagccatgtgaaggatggcagtcgccagaaatc

SEQ ID NO: 16725 - RNA, 142 nt, Pseudomonas sp.
  source 1..142: mol_type = other RNA; note = Related to JACASD010000120.1
aagcactgagcaagccttgaaaaaggcactcgttgatttataacgagtatgtccggagggggggcaccgcacgccgcctccatcctggagtagcgatagacggtaggttagccaatagaggatttggtagctatcagtgtct

SEQ ID NO: 16726 - RNA, 142 nt, Pseudomonas sp.
  source 1..142: mol_type = other RNA; note = Related to LS483433.1; note = Pseudomonas mucidolens
atgcactgagcacgccttgaaaaaggcacttattggttttccaatgagtatgtccggaggggggcaccgcacgccgcctccatcctggagtagcgatggacggtaggttagccaatagaggatttggtagctatcagtgttt

SEQ ID NO: 16727 - RNA, 139 nt, Pseudomonas sp.
  source 1..139: mol_type = other RNA; note = Related to NZ_BCBR01000170.1
caacactgagcacgcctgaaaaggcgctcgttgatgtctcggcgagcttgtccggaggggggcaccgtccgcctctcccgtcccggaatagtgaatgacggtaggttagccagagggaatttggtagctatcagtgtat

SEQ ID NO: 16728 - RNA, 148 nt, Pseudomonas sp.
  source 1..148: mol_type = other RNA; note = Related to NZ_RXHX01000002.1
cggcgctgagcaagcctttgtgaaaaggcgttcactgatgatttattagtgggcttgccggatgggggggcaccatgcgccttctcctgacccggagcagtgattgacggtaggttagccataggagatttggtagctatcggcgcat

SEQ ID NO: 16729 - RNA, 136 nt, Pseudomonas sp.
  source 1..136: mol_type = other RNA; note = Related to NZ_JAGQFP010000002.1; note = Pseudomonas stutzeri
aatgcatcgacttcgctcttaacagagcgcttgctgtttgacagcaagcatctggggcacggacggcacgatccgcttcctagagtagcgacagacggtaggttagccatagggggtttggctggatcggcgcact

SEQ ID NO: 16730 - RNA, 142 nt, Pseudomonas sp.
  source 1..142: mol_type = other RNA; note = Related to JAAMQS010000014.1; note = Pseudomonas kunmingensis
agtgcaccgtaaagctcttaggagcgctcaaagcttcaacgcaatgagcactagggacccggcgggacgatcctctatccggacccggagtagcgacagacggtaggtaagccatagagagatttggctgtatcggtgcatt

SEQ ID NO: 16731 - RNA, 144 nt, Pseudomonas sp.
  source 1..144: mol_type = other RNA; note = Related to NZ_LR134290.1; note = Pseudomonas mendocina
atgcatcgaaattgctcttaattgagcgcctgtagctatgactatgggcactccgggacaccggcgggacggttcgcctcctccgagccggagtagcgacagacggtaggttggccatggggagaaatggctgtatcggtgcac

SEQ ID NO: 16732 - RNA, 144 nt, Pseudomonas sp.
  source 1..144: mol_type = other RNA; note = Related to CP080287.1; note = Pseudomonas aeruginosa
gagcactgagaaggcctttgttgtatagaaggcgctcctatgggagcttttcgggcggagccccgcacagtgtgcgcctcctccgacccggagtagtgatggacggtaggttagccatagtggggttggcagctgtcagtgtgt

SEQ ID NO: 16733 - RNA, 157 nt, unidentified
  source 1..157: mol_type = other RNA; note = Related to NZ_CP033831.1; note = Serratia sp.
aaatactgagcatgcttagttattattagtataattgagcgccttttattgttcagaaggctaattgggagagcccctgcacacggtggcctcttccgacccggaataggggggaatgacggaaaaggcatgaggttgaagagagttgtcagtgtgt

SEQ ID NO: 16734 - RNA, 140 nt, Citrobacter sp.
  source 1..140: mol_type = other RNA; note = Related to CP055089.1; note = Citrobacter portucalensis
tttaattgactaatgccgcaaggcgcttagtttgactaagctattcgggagagggccccacgcacgcccctctctcggctacgcagagtagagttggacggtaagctcgatcatgggggttatggcagttgtcagttata

SEQ ID NO: 16735 - RNA, 140 nt, unidentified
  source 1..140: mol_type = other RNA; note = Related to JTBU02000001.1; note = Serratia marcescens
tttaactgactaaagccgcaaggcgcttagttttggctaagctattcgggagaggccacgcgcacgcccctctctcggctacgcagagtagagctggacggtaagctcgatcatggggatcatggcagttgtcagtaata

SEQ ID NO: 16736 - RNA, 140 nt, unidentified
  source 1..140: mol_type = other RNA; note = Related to MUJJ01000002.1; note = Pantoea vagans
gttaactggcaatgcctaagggcgcttggtttctccaagctacaccgggggcagcccccccgcacatgactcaactcatgaccccgagtagagatggacggtaaactcgaccatggaaaatatggcagtagtcagttaaa

SEQ ID NO: 16737 - RNA, 144 nt, unidentified
  source 1..144: mol_type = other RNA; note = Related to NZ_CP091194.1; note = Lysobacter gummosus
ggtcccgagcaatgctctgaatagagcgtccgagcttttacagctttggccactccggagggattcagtctccctctctctctaacgagaggagcgtgtgagagtaggtctagccatggggaaaaatggcagtaatcgggaagc

SEQ ID NO: 16738 - RNA, 139 nt, unidentified
  source 1..139: mol_type = other RNA; note = Related to NZ_VLXO01000050.1; note = Stenotrophomonas maltophilia
cgaacagagttttgctcatcggaaattgatgggtgcccatagggctccagagggtgacctcagtctcccgcctcccaaaaaatgcaggagcggagaatggacggcctaaccaggggttggaacgcagttgctctgtttg

SEQ ID NO: 16739 - RNA, 140 nt, unidentified
  source 1..140: mol_type = other RNA; note = Related to WELC01000020.1; note = Stenotrophomonas rhizophila
caaacagagttttgcccaccggaaaatggtgggcgcccgtaagggctccagagggaaacctcagtctcccgcctcccaaaaaatacaggagcggagaatggacagcctaaccaggggttggagcgcagttgctctgtttg

SEQ ID NO: 16740 - RNA, 145 nt, unidentified
  source 1..145: mol_type = other RNA; note = Related to NZ_CP052863.1; note = Stenotrophomonas maltophilia
gcggaaaggctttgctcgacgctctgaccggcgtcgggcgcccgtttgggctctaccgggagacctcgagtctcccgcccttcgttcctcaggagcgggggatgggtgacctagccgggaggtcggagagctgttgccttttcgt

SEQ ID NO: 16741 - RNA, 148 nt, unidentified
  source 1..148: mol_type = other RNA; note = Related to NZ_JABDRS010000003.1; note = Stenotrophomonas maltophilia
cgaagtggctttgcttggcgtcgcaaattggcgtcgagcgcccgattgggcttcgccgggaaactcccatgagtctcccgcccttcgttcctcaggagcgggggatgggcatcctagccgggaggtcggacagctgttgcctccttcg

SEQ ID NO: 16742 - RNA, 141 nt, unidentified
  source 1..141: mol_type = other RNA; note = Related to JAFRGP010000385.1; note = Rudaea sp.
cttcgccaattttgctctatgagcgctcgaggaatgttttaatctcgggcacgtctgggaggtaatactctcccgctctccgttccggagaagcgtgtggtatcaggcctagggatagagagatggcggttgttggcggaa

SEQ ID NO: 16743 - RNA, 136 nt, unidentified
  source 1..136: mol_type = other RNA; note = Related to NZ_MDDY01000002.1; note = Xanthomonas arboricola
tccagttagcattgctcgcctgagcgcatcaaagcactgctttgagcatttcggaggcttcagtctcccgccctcctttccggagaagcgcgtgttatcaggtccagggttgatgaggtggttgaagctaactggc

SEQ ID NO: 16744 - RNA, 158 nt, unidentified
  source 1..158: mol_type = other RNA; note = Related to NC_013889.1; note = Thioalkalivibrio sp.
caacgtcgatatctggcccgctaatctgaacaacctagtgggcgtcctcggagctatagagggctagaggggcgaagttcgtaccctcctctcctccgacccggaggagagattgacaataggtccgaccatgtggtgtgtggtagtagtcggcgttg

SEQ ID NO: 16745 - RNA, 164 nt, unidentified
  source 1..164: mol_type = other RNA; note = Related to JAGPVE010000007.1; note = Marinobacter sp.
gacctctaattgctcgttatgagcgttcgataattatcgaacttgtcggtaggagccccgcagggtccgccgcctctgaacccagagtagggtctccctcctctggctccagagtcgggagagacggtggagctggctgatagagttaggtggcatcagaggtt

SEQ ID NO: 16746 - RNA, 145 nt, Pseudomonas sp.
  source 1..145: mol_type = other RNA; note = Related to CP071730.1; note = Pseudomonas aeruginosa
actcgtacgtaatactgctcttaactgagcgtccgggtgacccgggcatgtcagagggtccgcaccctccctctccttccgggacccggaagagagagtgggacggtgggctacgtcatggggaacatggcagtctgatacgagt

SEQ ID NO: 16747 - RNA, 142 nt, unidentified
  source 1..142: mol_type = other RNA; note = Related to NZ_PZJP01000003.1; note = Salinicola aestuarinus
aagcagtggcattgcctgttgaaaggcaggcgtctcgagagaggctagagtgggagggggatggaccttgcgcgcgtctacccgcaccacctaaggatggtagacacggccagcaacctgtgaatggctgaggccgctgcta

SEQ ID NO: 16748 - RNA, 148 nt, unidentified
  source 1..148: mol_type = other RNA; note = Related to CP059843.1; note = Cobetia sp.
tagcattggagttgatgctccgttgaatcggggcgcctgcagcgatgcaggctcgagggggctccaagcactttggcttgggcttgtgtagcaacacctctggacggtgggcgtaatcagatgaaggcaaaggctgtagtcaatgcta

SEQ ID NO: 16749 - RNA, 145 nt, Pseudomonas sp.
  source 1..145: mol_type = other RNA; note = Related to JABEMH010000004.1; note = Pseudomonas fragi
atccgctggttagctcagtaatgagcgttcaatacctaggtattgaactgatgaggagagggccccggcagtctccgacccctgcgtcccgctggagtgtttcacggtggacctaccatgagaaaggtggtggttttcagcggat

SEQ ID NO: 16750 - RNA, 146 nt, Pseudomonas sp.
  source 1..146: mol_type = other RNA; note = Related to NZ_UUEU01000227.1; note = Pseudomonas viridiflava
atccgctggtttagctcagaaatgggcattcaatgtaattgcattgaactgatcaggagagggcaccggcagtctccgacccccgcgtcccgctggagtgcttcacggtgggcctaccatgagaaagatggtggttttcagcggat

SEQ ID NO: 16751 - RNA, 145 nt, Pseudomonas sp.
  source 1..145: mol_type = other RNA; note = Related to NZ_CP027762.1
atccgctggttagctcagtaatgagcgttcaatgcgaaagtattgaactgatgaggagagggccccggcagtctccgacccccgcgtcccgctggagtgcttcacggtgggcctaccatgagaaagatggtggttttcagcggat

SEQ ID NO: 16752 - RNA, 145 nt, Pseudomonas sp.
  source 1..145: mol_type = other RNA; note = Related to JAGYWD010000006.1
gtccgctggttagctcagtaatgagcgttcgatgcttcggtattgaactgatgaggagagggccccggcactctccgacccccgcgtcccgctggagtgcttcacggtgggccagccatgagaaagatggtggttttcagcggac

SEQ ID NO: 16753 - RNA, 155 nt, Pseudomonas sp.
  source 1..155: mol_type = other RNA; note = Related to PCQD01000007.1
gcctgttgaaatatgctctttagggcgtctagtttaatagctagacatattgggcggggccgcggcagtctccgactcccgcgctctgcgctcccgcgttgctggagtatttcatggcgagcgcaccacgagaaaggtggctgagttcaacaggt

SEQ ID NO: 16754 - RNA, 155 nt, Pseudomonas sp.
  source 1..155: mol_type = other RNA; note = Related to NZ_JAETZZ010000009.1; note = Pseudomonas putida
agtcggtgaaaatgcgtacttcggtatgcgctcagcgtttgagttgagctaatggggtggggggccccgcagtccccgacccccgcgctcccgctctcccgcaggagtatttcaaggtaggtgtagccatgtggtagtggcggtactcaccgact

SEQ ID NO: 16755 - RNA, 134 nt, unidentified
  source 1..134: mol_type = other RNA; note = Related to NZ_JAAAFX010000009.1; note = Variovorax boronicumulans
actcgttggatttgccttcgtaagaaggcgcttgcttgcaagcgtacgggaagggacctagggtcctctctccctctcggaagagagaacgtctgtagatctagccatgggaaatttggtagtttccaacgagt

SEQ ID NO: 16756 - RNA, 139 nt, unidentified
  source 1..139: mol_type = other RNA; note = Related to CP011924.1; note = Pseudoalteromonas piscicida
ttttgaggatatagcctgtgaattgcaggcgttcgttaaaaaacgaactcgtccgagggagcccgacactttcccactcaaacccagagtagaggttgacgtctaggctaggccgtttcgaggaatggcgtactcaaag

SEQ ID NO: 16757 - RNA, 141 nt, unidentified
  source 1..141: mol_type = other RNA; note = Related to PNDP01000055.1; note = Pseudoalteromonas sp.
gattttgggcttaatgcctgtattgacaggcgttcgtgaaagcgaacttgaccgaggaagcccgacaccttcccactcgaaaccaagagtagaggttgacgtctaggctaggccgttttgaggaatggcgtacccaaaatc

SEQ ID NO: 16758 - RNA, 139 nt, unidentified
  source 1..139: mol_type = other RNA; note = Related to LAHP01000027.1; note = Arsukibacterium sp.
ttgcattggtattgttcggatactcgaacgctcttatcgagcttatgagagggagccacgcgcaccctccgccactcaagaacggagtagcgtaggacggtaagcctgactttattgttctagattttaatctatgcaa

SEQ ID NO: 16759 - RNA, 135 nt, unidentified
  source 1..135: mol_type = other RNA; note = Related to PBYW01000011.1; note = Alteromonadaceae bacterium
attaatacgatattgcttacttcgagcgcccttaaaaggcttgaattggagacccgcacaccccccgccactcgcgcctctccgaggcgcagtagcgctggacggtaagcttggtcatggcagttcccgatttgt

SEQ ID NO: 16760 - RNA, 140 nt, unidentified
  source 1..140: mol_type = other RNA; note = Related to NZ_JACAVQ010000006.1; note = Aliidiomarina indica
ttcagctgatctttctgatttaaatcagaagctctcaaattggagagcaataggggagaactccgacagcctcctcaacgaaccgccgttgagttggacggtaggatcagccatggtagatagtatcattatcagctgag

SEQ ID NO: 16761 - RNA, 134 nt, Alcaligenes faecalis
  source 1..134: mol_type = other RNA; note = Related to NZ_UFSQ01000006.1
cgcgattagcatagctttttttaaaaagcgcctggttatccaggctttaaagggaagacccgatagactgtggcccccctgcaggtgtgccttgttaggattggccagcatttaattggtagtagctaatcgta

SEQ ID NO: 16762 - RNA, 138 nt, unidentified
  source 1..138: mol_type = other RNA; note = Related to NZ_BMXV01000003.1; note = Marinobacter zhanjiangensis
atgctaaagcgatgcttcatatgtatgaagcgctttgaaaaaagcacttccggcaagggacccagtcgcccctcctgctacgcagcagatgccggtgattgcacatggcccgagatgcagaggctgtttctttagcaa

SEQ ID NO: 16763 - RNA, 140 nt, unidentified
  source 1..140: mol_type = other RNA; note = Related to NZ_NIHC01000001.1; note = Marinobacter salexigens
gcgctaaagcgatgcttcatagaatttatgaagcgctttgagaaaagcacttccggcaggggatttagtcgccccaactgctacgcagtagatgtcggtgattgcacgggccggaaacgcagaggctgtttctttagcga

SEQ ID NO: 16764 - RNA, 141 nt, unidentified
  source 1..141: mol_type = other RNA; note = Related to CP034246.1; note = Shewanella algae
tcgctaaggtatgcttttaatattttagaagcgcctaaaataaggcttatccggcaaggtcgattccgtcgcccctcctgtcaagacagcagatgtcggtgattgcacaggctagaagcacagaggccgtcttcttagtga

SEQ ID NO: 16765 - RNA, 155 nt, unidentified
  source 1..155: mol_type = other RNA; note = Related to NZ_VSSP01000009.1; note = Luteimonas sp.
cgggttcggtatacgcgtactgcgtatttctagcagtgcgcgcttagcgtcaaagctaagctctaagggacatgcggttccgccgccctccgaaaccggaggagctttcccgaaggtggatcaagccagcacgagagcggcagttgctgaacctt

SEQ ID NO: 16766 - RNA, 153 nt, Proteus sp.
  source 1..153: mol_type = other RNA; note = Related to DPFJ01000041.1
aattgctagctttgcttccttatggaagcgtctgactaagtatattataagtcagactcgatccgaggccccaccgccgccagacgacggctggtgccgtagctgtcgggcattacttacggtcgtaagtagcagaggctgttgctagcaatg

SEQ ID NO: 16767 - RNA, 140 nt, unidentified
  source 1..140: mol_type = other RNA; note = Related to NZ_CP035382.1; note = Leclercia adecarboxylata
atttgctagctttgcctccttctgggggcgtctggtttaccagactcgatccgaggccccaccgtcgccaccgacggctggcgccgtagctgtcgggcattacttacggtcgtagaacgcagaggctgttgctagcaatg

SEQ ID NO: 16768 - RNA, 140 nt, unidentified
  source 1..140: mol_type = other RNA; note = Related to CP008955.1; note = Yersinia kristensenii
aattgctagctttgcttccttagggaggcgtctggtttaccagactcgatccgaggccccaccgtcgccatcgacggctggcgccgtagctgtcgggcattacttacggtcgtagaacacagaggctgttgctagcaatg

SEQ ID NO: 16769 - RNA, 140 nt, Enterobacter sp.
  source 1..140: mol_type = other RNA; note = Related to NZ_JAHEVU010000002.1; note = Enterobacter quasimori
atttgctagctttgcttccttagggaagcgtctggtttaccagactcgatccgaggccccaccgccgccaacgacggctggtgccgtagctgtcgggcattgcttacgatcgtagagaacagaggctgttgctagcaata

SEQ ID NO: 16770 - RNA, 139 nt, Escherichia coli
  source 1..139: mol_type = other RNA; note = Related to NZ_LR778152.1
atttgctagcttttgccccctagggggcgtctggttatccagactcgatccgaggccccaccgccgccaacgacggctggcgccgtagctgtcgggcattacttacggtcgtagagaacagaggctgttgctagcaact

SEQ ID NO: 16771 - RNA, 139 nt, unidentified
  source 1..139: mol_type = other RNA; note = Related to JACFXZ010000002.1; note = Pectobacterium aroidearum
aattgctagctttgcttccctagtggaagcgtctgggtaaccagacacgatccgaggccccaccgtcgccacccacggcggtgccgtagctgacggcattacttacggtcgaggaaaacagaggctgttgctagcaatt

SEQ ID NO: 16772 - RNA, 145 nt, unidentified
  source 1..145: mol_type = other RNA; note = Related to NZ_HG738868.1; note = Serratia marcescens
ttttgttagctttgctttcatttatgaaagcgtctggactaacatccagacaagttccgaggccaccaccgtcgccatccccggcgatgccgtagctgacggcattacctacggccgaggataacagaggctgctgctaacaaat

SEQ ID NO: 16773 - RNA, 139 nt, unidentified
  source 1..139: mol_type = other RNA; note = Related to CP015613.1; note = Serratia inhibens
aatcgttagattttgctttttaattaaagcgtcctttatggacctatcggtaaggccccaccatcgccacctacgatggtgccgtagccgacgacattacgtacggtcgaaaagataacactggctgctactgacgatt

SEQ ID NO: 16774 - RNA, 138 nt, Citrobacter sp.
  source 1..138: mol_type = other RNA; note = Related to CP040698.1; note = Citrobacter freundii
aatcgttagattttgctttttataaaagcgtcctctatggacatatcggcatggccccaccgtcgccaactacgatggtgccgtagccgacgacattacgtacggtcgaaaagataactctggctgctactgacgatt

SEQ ID NO: 16775 - RNA, 138 nt, Escherichia coli
  source 1..138: mol_type = other RNA; note = Related to CP088348.1
aattgtcagtttttgcttttacaaaaaagcgtccactatggacctatcagcgaggccccaccgtcgtcaactacgatggtgccgtagccgacgacattacgtacggtcgaaagatagcagaggctgttgctgacaatt

SEQ ID NO: 16776 - RNA, 154 nt, unidentified
  source 1..154: mol_type = other RNA; note = Related to NZ_CAKLIV010000013.1; note = Pectobacterium versatile
atttgtcagcttttgctttcctgaaacctttgggaaagcgtcctataaacggacatatatggaaagcgccaccgtccttgtcaacggccccggtggtgccgtagccaacggcattgcgtgcagttgctatgaacagaagctgttgctgacaagc

SEQ ID NO: 16777 - RNA, 157 nt, Proteus hauseri
  source 1..157: mol_type = other RNA; note = Related to AWXP01000008.1
ttttgttaggtattgctttaaattttatatttagagcgtccaaaatgtttggacatttccgaaggccacgaccatcgcagtcaacggcggtaaagataccgtagcctacggcatattgcacatagccgctatagagtgatggctgatgctaacaaaa

SEQ ID NO: 16778 - RNA, 160 nt, unidentified
  source 1..160: mol_type = other RNA; note = Related to NZ_OU659150.1; note = Providencia alcalifaciens
tgctgttagcttatgctttaaatcagatcaggatttggagcgccttattagcataaggcatgttccgtgggctcgaccatcgctggcaacggcgaacacataccgtagccaacggcatattgcatgtggtcgtattgaatggcggctgttgctaacagta

SEQ ID NO: 16779 - RNA, 152 nt, unidentified
  source 1..152: mol_type = other RNA; note = Related to JACYNA010000001.1; note = Pantoea agglomerans
agtttttagcttccgctctcgctaaaagtgtgagagcgcctatgcaatgcataggctggaacggaacccccacatagcctggccggcgacgatggggctgtagccgtcctcaattgcgtccggtcagagaataggggcagttgctaagaact

SEQ ID NO: 16780 - RNA, 155 nt, unidentified
  source 1..155: mol_type = other RNA; note = Related to NZ_JAENMQ010000001.1; note = Lelliottia aquatilis
gtttcttagcttccgctctcgcagtgtacatgtgagagcgcctgtgcaaacgtacaggctggaacggaacccccacaaagcctggccggcaacgatggggctgtagccgtcctcaattgcgtccggtcaaagaataggggcagttgctaagggct

SEQ ID NO: 16781 - RNA, 155 nt, unidentified
  source 1..155: mol_type = other RNA; note = Related to CP043932.1; note = Klebsiella pneumoniae
gtttcttagcttccgctctcgcaacagaaaagtgagagcgcctatgcagtagcataggctggaacggaacccccacaaagcctggccggcaacgatggggctgtagccgtcctcaattgcgtccggtcaaagaataggggcagttgctaagggct

SEQ ID NO: 16782 - RNA, 152 nt, unidentified
  source 1..152: mol_type = other RNA; note = Related to NZ_JAFMOV010000254.1; note = Rahnella perminowiae
atctcttagcgtttgctcttatgatttctaatgagagcgtctgtgttaacacagacatgtacggtgctcccacctagcctggtcggcgacgatggggccatagccgtccgcaattgcatccggtcaaggaatagaggcagttgctaagagat

SEQ ID NO: 16783 - RNA, 160 nt, unidentified
  source 1..160: mol_type = other RNA; note = Related to NZ_JAGKOO010000001.1; note = Providencia huaxiensis
aattcttagcgtttgctctcatgataattgtaaaatgagagcgtttatgtatacagtacataaacatgttcggtcccccacctagcctggccggcgacggtgaggctgtagccgtccgcaattgcatccggtcaaggaatagaggctgttgctgagaata

SEQ ID NO: 16784 - RNA, 145 nt, unidentified
  source 1..145: mol_type = other RNA; note = Related to HF933424.1; note = Yersinia enterocolitica
atcacttagcctttgctcttttaattagagagcgcctgatttattaggctcgatcggagacccccacctagcctggccggcgacgtgggacagtagccgtcggcattacatctggtcaaaggaatagaggctgttgctaagtggg

SEQ ID NO: 16785 - RNA, 147 nt, unidentified
  source 1..147: mol_type = other RNA; note = Related to NZ_CABHWQ010000046.1; note = Yersinia alsatica
accacttagcctttgctttccttgttgagggaagcgcctgtttaacaggcttgtacggaggccccccacctagcctgtccggcgacgtggggcagtagccgtcggcattacatccggtcatcggaatagaggcagttgctaagtggg

SEQ ID NO: 16786 - RNA, 151 nt, unidentified
  source 1..151: mol_type = other RNA; note = Related to CPZT01000016.1; note = Yersinia enterocolitica
accaactagcttatgctctttttttaatatgaagagcgtctgtgtaaacaggcatgtacgaaggccaccgaccctcgctggcaacgatggggcgctgtagccaacggcattacatccggtcaaacggggatagaggcagttgttaggtggt

SEQ ID NO: 16787 - RNA, 156 nt, unidentified
  source 1..156: mol_type = other RNA; note = Related to NZ_MDKE01000022.1; note = Oceanisphaera psychrotolerans
cgtatttgtcttttgctctattttatatagagcgctggagttaaaaaaccagcattgccgaggcctgcaccctatgcgcccctcccggcccttcggaccgagagtagcgaaggacgatgagcttagccagagaaatggtggcagttgacaaatata

SEQ ID NO: 16788 - RNA, 157 nt, unidentified
  source 1..157: mol_type = other RNA; note = Related to NZ_SODO01000004.1; note = Oceanimonas baumannii
cgtatttgtcgcctgctctatgttgttagatagagcgctggacgaaagttcagcatgttcctaggctgcaccctatgcgcccctcccggccctccggaccgagagtagcgatagacgatgagcttagccagagaagtggtggctgctgacaaatata

SEQ ID NO: 16789 - RNA, 142 nt, unidentified
  source 1..142: mol_type = other RNA; note = Related to BADY01000010.1; note = Pseudoalteromonas sp.
agtgtttggataatgctcttaattgagcgcttaacgttacttgttaagcttgtgcttcggccacaccctccgtctcctcgaaaccaagagtagccgtgaacgataggcttagttatagaaatggtggcagtttccaaatgtt

SEQ ID NO: 16790 - RNA, 137 nt, unidentified
  source 1..137: mol_type = other RNA; note = Related to JAHKPR010000090.1; note = Colwellia sp.
aacatttggcttgtatgcctttcacagggcgcctagcaataggcatgtgcttcggccacaccctccgactactcgaaaccaacagtagccgaggacgatgggcttaatcatagaaatggtggctgttaccaaatgtt

SEQ ID NO: 16791 - RNA, 152 nt, Vibrio sp.
  source 1..152: mol_type = other RNA; note = Related to REBK01000001.1
tatgtttacttcatgctctttatttaaagagcgctggactacggttcagcttgtgccaagccgcaccctatgcgctccgctcgccccttcggaccgagagtagcgaaggacgatgggcttagccagaggaatagtggcagttagtaagcgta

SEQ ID NO: 16792 - RNA, 155 nt, unidentified
  source 1..155: mol_type = other RNA; note = Related to UGTC01000001.1; note = Plesiomonas shigelloides
tgcactcacttaaagctctcatagattttattgtgagagcgccgaacttttaagtttcggcttgtgcctagccgcacgctaacgcaactccctcgaccgagagtagcgttggacgataagcttagccagagaaatggtggcagttagtgagtgca

SEQ ID NO: 16793 - RNA, 161 nt, unidentified
  source 1..161: mol_type = other RNA; note = Related to CP000020.2; note = Aliivibrio fischeri
aatatttgtatattgctcttaattgagcgctgaatagtgaagatctagttacttatcagcttgtgccaaggggcacaccctatgcctgcctcgtcttttgaccgagagtagtcgaggacaataggcttagccaaactaaacggtggctgtttacaaatatt

SEQ ID NO: 16794 - RNA, 157 nt, Vibrio sp.
  source 1..157: mol_type = other RNA; note = Related to BODJ01000024.1; note = Vibrio cholerae
aatatttgtatattgctcttaatagagcgctgaatagtgaagatttgattacttatcagcttgtgccaagggcacaccctatgcttgcctcggccaaaccgagagtagacgaggacgataggcttagccaaagaaatggtggctgtttacaaatgtt

SEQ ID NO: 16795 - RNA, 147 nt, Vibrio sp.
  source 1..147: mol_type = other RNA; note = Related to MCYK01000079.1; note = Vibrio lentus
tataactgaactaagctcttagctgagcgctacattaagtagcaggtgccaaggcccacaccctccatttgcctccccctccgcggaccgagagtagagggaggacgctaggtttagccagaagaatagtggcagttttcagttatt

SEQ ID NO: 16796 - RNA, 152 nt, Vibrio parahaemolyticus
  source 1..152: mol_type = other RNA; note = Related to ABGCYW010000004.1
agtgttcggtcttagctctatatggagcgccgtctattttaatagatggtctgtgcggaggcccacaccctccccttggctctcctcggcgcaagcttgagtagaacccgactaggcctgaccttatatattgttggcagtaaccgaacatt

SEQ ID NO: 16797 - RNA, 153 nt, Vibrio sp.
  source 1..153: mol_type = other RNA; note = Related to NZ_POSL01000026.1; note = Vibrio diazotrophicus
aatgttcggtcttagctcttatggagcgccgtttatctttgataaatggtctgtgcggaggcccacaccctccccttggctctcctcggcgcaagctagagtagaacctgactaggcctgaccttattatactgttggcagtaaccgaacatt

SEQ ID NO: 16798 - RNA, 166 nt, Vibrio sp.
  source 1..166: mol_type = other RNA; note = Related to NZ_CP051101.1; note = Vibrio navarrensis
gctgtttggtctttgctctttatggagcgctgtttgcattcgtgcagatagtatgtgcggaggccacaccctcgccttggctctccctcggccttacctagagtagagtatcgagagagcctcactaggcctgactttgttatatgactggcagtaaccaaacagt

SEQ ID NO: 16799 - RNA, 155 nt, unidentified
  source 1..155: mol_type = other RNA; note = Related to NZ_CP068230.1; note = Shewanella algae
ggtgttcggtcttagctctaatatggagcgccgtctgttgtcaacagatggtatgtgcggaggcccacaccctcccattggttctcctcgtcgcaagctagagtagaacctcattaggcctgaccttaatatattgttggcagtaaccgaacacc

SEQ ID NO: 16800 - RNA, 149 nt, Vibrio sp.
  source 1..149: mol_type = other RNA; note = Related to JAHUCR010000005.1; note = Vibrio fluvialis
tttggttattattgcctcaattattgaggcgctatcgacacagtcgatggtctgtgcggagggcctcgcaccctcccatcgcttctcctctacctagagtagaacctgctgggcttgatccgaaatttttctggcggatgttaaccaaa

SEQ ID NO: 16801 - RNA, 145 nt, unidentified
  source 1..145: mol_type = other RNA; note = Related to NZ_PJPV01000060.1; note = Endozoicomonas acroporae
gatcgtagagatgctcagcgatgagcgctcggaaacgagcttaccgggaaggggcgcacccttcgctgctccttggctcctccggacccggagtagcatcggacgataggcttggccagagagacattggcagatactacagatc

SEQ ID NO: 16802 - RNA, 139 nt, Aeromonas sp.
  source 1..139: mol_type = other RNA; note = Related to NZ_KQ087566.1; note = Aeromonas caviae
cgccaatagtatcagccctgttcacagggcgcctgctttagcaggcttttcgccggctcaccctccgccgtctccaaaagagactgtagcctgcggtaattggcattggttcgaaaagagatggcagaagctattggtt

SEQ ID NO: 16803 - RNA, 146 nt, Aeromonas hydrophila
  source 1..146: mol_type = other RNA; note = Related to VHIX01000003.1
cgccaatagtattagccctgtagacagggcgcctgcttacttagtagcaggctgtttcgccggctcaccctccgccgtctccaaaagagactgtagcctgcggtaattggcataggttcgaaaagagatggcagaagctattggtt

SEQ ID NO: 16804 - RNA, 144 nt, Aeromonas sp.
  source 1..144: mol_type = other RNA; note = Related to CP023817.1
cgccagtagcattagcctttgaaatatagggcgcctgcttagttgcaggctatttcgccggctcaccctccgccgtctccaaaagagactgtagcctgcggtaattggcattggttcgaaaagagatggcagaagctattggtt

SEQ ID NO: 16805 - RNA, 143 nt, Aeromonas sp.
  source 1..143: mol_type = other RNA; note = Related to JAIEYG010000002.1; note = Aeromonas veronii
cgccagtagtattagcccttgcagtttagggcgcctgcataaagcgggctttttcgccggctcaccctccgccgtctccaaaagagactgaagcctgcggtaattggcattggttcgaaaagagatggcagaagctattggtt

SEQ ID NO: 16806 - RNA, 163 nt, Vibrio sp.
  source 1..163: mol_type = other RNA; note = Related to NZ_CP019291.1; note = Vibrio vulnificus
cctattcagatgtagctctaacgagcgactgattgacgttagtttttcagtctgatgccaaggcctaccgccgccttccgcaagcaagcttgcgaccggcagcagcgttcgcgaggctcactggatcgtcggtttggataaaattaggtagtttctgatttag

SEQ ID NO: 16807 - RNA, 163 nt, Vibrio sp.
  source 1..163: mol_type = other RNA; note = Related to DS179564.1; note = Vibrio campbellii
ccggttcagatgtagctcttcggagcgactgattaacgtaagtttttcggtctgatgccaaggcctaccgccgccctccgcaagcaagcttgctcccggcagcagcgttcgcgaggctcactggatcgtcgatttgggtaagattaggcagtttctgatttag

SEQ ID NO: 16808 - RNA, 163 nt, Vibrio parahaemolyticus
  source 1..163: mol_type = other RNA; note = Related to JABCGZ010000001.1
cattacagaccatgcctttcataggcggctacctaattaatactaggtagcctgatgccaaggggtaccgccgcctcccgcaagcaagcttgctaccggcagcagcgttcgctatggctcactggattgtcggtttgggtagagataggcagtttctgtttta

SEQ ID NO: 16809 - RNA, 150 nt, unidentified
  source 1..150: mol_type = other RNA; note = Related to JADQAO010000002.1; note = Photobacterium damselae
ccatttcagattaagcccgtcatgggcgactatttattaatagtctgatgccaaggggttcaccgccgccgctcgcacgcttgcggcagtagcgttcgcaggcttcactggatagtcggtttggataaaaataggcagtttctgatttag

SEQ ID NO: 16810 - RNA, 130 nt, Acinetobacter sp.
  source 1..130: mol_type = other RNA; note = Related to NZ_VOXY01000007.1
ggtatctatctgctgattttatcagtgctagatttatctagcttgtggggagagggtcggttccgtcctatttgtcccaaataatcctgatagtcgaaggtagtagtttatgtggttatccatagatgcc

SEQ ID NO: 16811 - RNA, 137 nt, Acinetobacter sp.
  source 1..137: mol_type = other RNA; note = Related to NZ_CP067019.1
tatctatttgctgattattcttaattagcgttggggaaacctaacatgtgtggaggggatccgggttccgtcacttcctctgccaagcaagtagctgataagtgaagttaatagttgatttggtttattcttggata

SEQ ID NO: 16812 - RNA, 150 nt, Pseudomonas sp.
  source 1..150: mol_type = other RNA; note = Related to CP061850.1; note = Pseudomonas aeruginosa
cccaagttgtttggctgttttttgaacagcgatctgcaggggtgactttgtagatcacgtggggtggcgcggcagagctttcttaggctgtcgatagcgtaatctcggtgattggccgtgctcgtagagtagaggcagtccttctttggg

SEQ ID NO: 16813 - RNA, 152 nt, Pseudomonas sp.
  source 1..152: mol_type = other RNA; note = Related to NZ_LR130779.1; note = Pseudomonas oleovorans
cccgagttgtttggctgttgtgattaacagcgatctgaaagggcaacctgacaggtcatgtggggaggcggcggcataacaagctcagtttgccgacagcactatctcggtgattggccgtgctcgtagagtagaggcagaccttcttcggg

SEQ ID NO: 16814 - RNA, 144 nt, Pseudomonas sp.
  source 1..144: mol_type = other RNA; note = Related to NZ_RFFM01000002.1; note = Pseudomonas zhaodongensis
aacccgagattttgctagctgttgttaggctagcggtgttgcatgcagcgccacgtgggatggcggccaggcctcagccttggaccgacaatagacccccagtgatcggcctgacttgcagagtgaaggcggctttctttgggt

SEQ ID NO: 16815 - RNA, 188 nt, Vibrio sp.
  source 1..188: mol_type = other RNA; note = Related to PIFQ01000031.1; note = Vibrio splendidus
ctcaacggtcattactaagatttctgtaaacgtttttattggtctggcaggcattttcgccgaaaactaataggagcatattttatgtctaagttaaatctagatatccgttacacaaactcaaaaaaagacacagaactcacagttggagtcaactatgaatcttctgaagcgcaaaatgaccagag

SEQ ID NO: 16816 - RNA, 188 nt, Vibrio sp.
  source 1..188: mol_type = other RNA; note = Related to NZ_AFWF01000003.1; note = Vibrio ichthyoenteri
ctcaacggtcattactaagatttctgtaaacgtttttattggtctggcaggcgattacgccaacaactaataggagcaaaaaaaatgtttaaatttaatttacacatccgttacacaaatcaaaaagaaaacacagaactcaatgttgaagccaactatgaatcttctgaattgcaaaatgaccagag

SEQ ID NO: 16817 - RNA, 187 nt, unidentified
  source 1..187: mol_type = other RNA; note = Related to NZ_CP035780.1; note = Photobacterium damselae
ctcaacggtcattactaagatttctgtaaacgtttttattggtctggcaggcaatttcgcccacaactaataggaacaaaaaaatggcaaagattaactttcgcatccgttacacaaatcaaaagaaaaacacagaactcgatgttgcagccaactacgaatcttctgaacagcaaagtgaccagag

SEQ ID NO: 16818 - RNA, 187 nt, unidentified
  source 1..187: mol_type = other RNA; note = Related to MCUF01000038.1; note = Shewanella sp.
ctcaaaggtcattactaagatttctgtatgcgtttttattggtctggcagacaattcagtcaacaacctataaggacaaaaaaatgtttaaatttaactttaacatgcgttacacaaataaaactgaaaacacagaactcgtggttggagccaattgcgaatcatctgaacagcaagatgaccagag

SEQ ID NO: 16819 - RNA, 186 nt, unidentified
  source 1..186: mol_type = other RNA; note = Related to JACJDR010000003.1; note = Pseudoalteromonas sp.
cccaaaggtcattattaagatttctgtaaacgtttttattggtctggcagacaattaagtcaaaactaataaggaacaaaaaatgtataagttaaaactacacattatttacacgaacaaaaatgaaaacacagatattaatattttagtaaatgttgataaatctgaacagcaaaatgaccaggg

SEQ ID NO: 16820 - RNA, 189 nt, unidentified
  source 1..189: mol_type = other RNA; note = Related to NZ_AP023033.1; note = Agarivorans aestuarii
ctcaatggtcattatttagatttctggttcaaaacttattggtctggcagggcaatttcgtccacaactaataggagacattaatatgtctaagcttgatttaaatatccgttacacaagccaaaaagaaagcacagagctcactgttgaagccaactatgagtcaactgaaaagcaaaatgaccagag

SEQ ID NO: 16821 - RNA, 181 nt, unidentified
  source 1..181: mol_type = other RNA; note = Related to JAACRB010000019.1; note = Shewanella frigidimarina
ctcaacggtcattactaagatttctgttaacgtttttattggtctggcaggcacttcgctaacaacctataaggacaaaatatatgtttatatttaacatgcgttacacaagtaaaagtgaaaacacagagttcgaaattggagtcaattacgaatcctctgagaagcaaaatgaccagag

SEQ ID NO: 16822 - RNA, 191 nt, unidentified
  source 1..191: mol_type = other RNA; note = Related to LR721750.1; note = Aliivibrio wodanis
ctcaatggtcattattaagatttctgtatcaaagtttttattggtctggcagggtaatttagcccaacaaccaagaggaaacaaaaaatgaacaaatttcatttcatgatacgttacacaaataaacttaaaaacacagaactcgagattgaagccaattacgaatcttctgaacaacaaaatgaccagag

SEQ ID NO: 16823 - RNA, 187 nt, unidentified
  source 1..187: mol_type = other RNA; note = Related to PYLU01000035.1; note = Photobacterium iliopiscarium
ctcaacggtcattaataagatttctgtgaaagatttattggtctggcatggcacttttgcctcaaacccataaggatttcaatatgaaaaagtttacttttacagtacgttactcacaaaaaaataagaacacagaattcaacgttggaatcaatgctgaatattctgaacagcaaaatgacccgag

SEQ ID NO: 16824 - RNA, 198 nt, unidentified
  source 1..198: mol_type = other RNA; note = Related to WEJX01000068.1; note = Plesiomonas shigelloides
gctctgtatcatcactagtatttctgccgatgtttacctaatggtctagcagagaagtcaattctggcttccataatccagagggaatagcatatgcgcaagtcaattgtgaaagcacggtatcgcaacaaaaaaaagggcacagagtttacgtttgaagtcagacgtgaaagttctgctaaacgagatgatcagagc

SEQ ID NO: 16825 - RNA, 177 nt, Vibrio sp.
  source 1..177: mol_type = other RNA; note = Related to LIZL01000063.1; note = Vibrio splendidus
ctcaacggttattactattatttctgcttccaaatattggtctggcgaatttcgttaacaatataaggagtacaagatgaaatttaatttcaaattacgttacgttaaatcaccagaaaacacagaccttgcagttgagttaaacggcgagagttctgatacgcaagataaccagag

SEQ ID NO: 16826 - RNA, 178 nt, unidentified
  source 1..178: mol_type = other RNA; note = Related to BPET01000001.1; note = Shewanella sp.
ctcaacggttattacatatatttctgttcctgatattggtctggcgaattatcaccacaatagaaggagacattaaaatgtcatttagttttaaattatgttacgcaaaaacacgtgaaaacacagaccttgcagttgagataaacagtgaggactctgaatcgcaaaataaccagag

SEQ ID NO: 16827 - RNA, 188 nt, Vibrio sp.
  source 1..188: mol_type = other RNA; note = Related to NZ_JSTD01000043.1; note = Vibrio cholerae
ctcactggctatttatatgtatttctacaagattccttctattggtctggcgaatggttttcattagcaaacaataaggaggtctaaatgaaatcttacttcaaactacgttacagcaaatcaccagaaaacacagagctctctgttgagttaaatagagatgatactgataagcaagatagcccgag

SEQ ID NO: 16828 - RNA, 177 nt, unidentified
  source 1..177: mol_type = other RNA; note = Related to NZ_CP084222.1; note = Arsenophonus sp.
ctcagtggtcaattaaattatttctgtggctcttttggttggtctggcgaattttaaaccaacaataaggagatttatgtttatgcgtaagctaacactcaaatataaacgcattacaaagaacactgaatcgatattcgaagccgagtacgagacaaaaacacaagttgaccagag

SEQ ID NO: 16829 - RNA, 183 nt, Vibrio sp.
  source 1..183: mol_type = other RNA; note = Related to CP063377.1; note = Vibrio diabolicus
ctcaatggtcaataaaattatttctgtggctctctttattttggtctggcgaatcattcaccgccaacaataggaggcactcatgtctaagcgcaagctgaaactcaaatgtaaacacgttacaaagaacaccgagtcgattctcgaagccgagtacgagacggataaacaagttgaccagag

SEQ ID NO: 16830 - RNA, 182 nt, unidentified
  source 1..182: mol_type = other RNA; note = Related to NZ_KB907054.1; note = Psychromonas ossibalaenae
ctcaaaggtcaatatatttatttctgtcatttccaacttggtctggcgtgcaaattcgcacatgccatagaaggaaagcaaatggatagttttaatatttcattcaagttagtaaaacacacaaagaactcggacttaaacattgaagccaattttgagtctaaaacgcgagttgaccagag

SEQ ID NO: 16831 - RNA, 189 nt, unidentified
  source 1..189: mol_type = other RNA; note = Related to JAHKPW010000044.1; note = Colwellia sp.
gtgacgggttaattaaattatttctggttattccattattggtctggcgcgattaaattcgcttcacttaaataaaggagaacacaatgttaaaatttagtttttacatcagatttacgaataaaacgaagaactttagtttgatatctggaggcagtatcgaatcgaagaagcaagttaaccccgaac

SEQ ID NO: 16832 - RNA, 186 nt, unidentified
  source 1..186: mol_type = other RNA; note = Related to NYUN01000050.1; note = Haliea sp.
ctctctctgtgcgtatgctctaataaaagctcaccatttggtctggcacccaattccgggtaactaaatgtggaggtgcaatatgcacattaactttgaaataaacttagctatttgttgtagtaaaaaaagagatgactattccactagagatagtgaactagttcatagacgtaaaggagagag

SEQ ID NO: 16833 - RNA, 163 nt, unidentified
  source 1..163: mol_type = other RNA; note = Related to NZ_CP047240.1; note = Pseudoalteromonas sp.
tcaaatggttaattaatttatttctatatttcttccttggtctggcaattttaaccaaaacaggagaagaaaatgctgttaaagctatcttgcaccattaaaaccaatgaaacagagctatccttttttgcagagtttagctcggataagcaagttgacctga

SEQ ID NO: 16834 - RNA, 187 nt, Citrobacter sp.
  source 1..187: mol_type = other RNA; note = Related to CP077405.1; note = Citrobacter braakii
tgtcaggtcgacaatattaccttcatataagttatctcggtctggcggcgtaattttgcgtctaaaatcgagaaatcaactatgtttagtatctctttaaacatgcaagtgacattcaaaaaaacgaagagctcaatttcagagaaaatagatagtcctgaagttgatatgcaagtcgaccaaaaca

SEQ ID NO: 16835 - RNA, 188 nt, Enterobacter sp.
  source 1..188: mol_type = other RNA; note = Related to JAHEVB010000007.1; note = Enterobacter hormaechei
tgtcaggtcgacaatattaccttcataagcgttatctcggtctggcggcgcaatttcgcgtcctaacaatgagacaacatctatgtttactttaactttaaacatgcaagtgacgttcaaaaaaatgaagagctcaacttcagtgaaaaaagacattcctgaagttgatatgcaagtcgaccgaagca

SEQ ID NO: 16836 - RNA, 186 nt, unidentified
  source 1..186: mol_type = other RNA; note = Related to NZ_CP055904.1; note = Klebsiella aerogenes
agttaggtcgacaatattaccttcagtgaaaggctcggtctggcggcgcaataagcgtcttaattttcgaggctatgcacatgtttaatattatcttaaatctgcacgtgacatttaacaaagtaaagggctcagtagtaaagaaagtagatgttcctactactgatgagcaagtcgaccgaagca

SEQ ID NO: 16837 - RNA, 188 nt, unidentified
  source 1..188: mol_type = other RNA; note = Related to CP018628.1; note = Lelliottia jeotgali
tgttaggtcgataatattaccttcagtaaatttacttggtctggcagtgcaattctgcactataaccaaaaaggtaaatttcatgtttaatttaagcttcaatctgcaagtgacattgattaaaaacgagagctcagtttcaaagaaagtagacgttcctgaaactgaagtgcaagtcgaccgaaaca

SEQ ID NO: 16838 - RNA, 188 nt, unidentified
  source 1..188: mol_type = other RNA; note = Related to JACYNC010000004.1; note = Pantoea agglomerans
tgtttaagtcgacataatttaccttatttgacctctggtctggcggcacaattttgtgtcctaaacagagatatcaaagatgaaatttaatttcaaacttaaacttaatatgacatttggttttaaaaagggtatgacattacctaaaacagaatcaagtaatgctcatgagcaagtcgacggaaaca

SEQ ID NO: 16839 - RNA, 187 nt, unidentified
  source 1..187: mol_type = other RNA; note = Related to CP026378.1; note = Mixta calida
tgttgaagtcgacatgatttaccttatttgagctctggtctggcagcgtaattatgcgcttcaacggagatatcaaatatgaaattcaatctttcatttaaacttaaaatgacatttggttttaataagagcacggcattacccaaaacagaattaagtaatgtcagtgagcaagtcgacggaaaca

SEQ ID NO: 16840 - RNA, 190 nt, unidentified
  source 1..190: mol_type = other RNA; note = Related to CGBL01000001.1; note = Yersinia aleksiciae
tgtaagagtcgatataatttacctgaaaagaacttcggtctggccgtaccagcaggtacgcttaaacgaaggaactttacaatgaagtgtaattatactttcaacctgaaattggcatttggttttaaaaagagctcaactttacctacaaaagaaagtggtaaggtgaatgcgcaagtcgactcaagca

SEQ ID NO: 16841 - RNA, 191 nt, unidentified
  source 1..191: mol_type = other RNA; note = Related to NZ_MJIB01000008.1; note = Rahnella sp.
tgtaagggtcgatataattttcctgaacagaacttcggtctggccgtaccgtccggtacgctacgcggagtaatgaaatatgaagaagataaattataccttcaacctgaaattagcatttgatgtaaaaaagaaatataccccacctacactagaaggtggtggggtgaatgtgcaagtcgacccgaaca

SEQ ID NO: 16842 - RNA, 187 nt, unidentified
  source 1..187: mol_type = other RNA; note = Related to JAFJAP010000008.1; note = Serratia marcescens
tttttaggtcaatataattatcctgataagaaaatcttggtctggccgcaccaatatcggtgtgaaaccacaggattattcaacatgaaaattgattttaatttccgcttgacattctcaaaaaaagagagctctgtttcaaaccctcgagagaggactgagactagaaagcaaattgacctaaaat

SEQ ID NO: 16843 - RNA, 180 nt, unidentified
  source 1..180: mol_type = other RNA; note = Related to KI929259.1; note = Serratia marcescens
tattcaagtcgattattttatcctgatgtggatccttggtctggccgtacatgtgtacgattgaactgggagatacggaaatgtttacattcaaactaaaattgactatcaacaataataagagcttggtgcaaaatcttcgagagaggaattgtacgacaaagcaaattgacttgaatt

SEQ ID NO: 16844 - RNA, 188 nt, unidentified
  source 1..188: mol_type = other RNA; note = Related to QDKH01000022.1; note = Brenneria sp.
tgtttgagtcaatatattcgtccacaaatgattgcttcggtctggtgatgcaattttgcatctaagatgaggtaatatcatgaaaaagaagtatagatttaacctgaaattggcatttgatgttgaaaagagcttgactgactccgctagagatagtgatttggttgaaaagcaagttgactcaaaca

SEQ ID NO: 16845 - RNA, 191 nt, unidentified
  source 1..191: mol_type = other RNA; note = Related to NZ_WUBF01000012.1; note = Pectobacterium polaris
tgtttgagtcaatataatttatccacctatgattacttcggtctggtgatgcaattttgcatctataagaggaagtaatattatgaaaaagaaatacaagttaaacctgtcgttggcatttgattttgaaaagaacttgaccatttctgctagagatagtgatttggttgaaaagcaagttgactcaaaca

SEQ ID NO: 16846 - RNA, 180 nt, Aeromonas sp.
  source 1..180: mol_type = other RNA; note = Related to NZ_UETL01000014.1; note = Aeromonas media
ccctagagccaattatatattccggtcaatcccccttggtctggcagtcaacacgccgtgttggctttaacctggaggaattgaaaatgagtaaacgtaagaagaagtgtgttggtaagaacgctacgcgctcacgtcgagagaatgagcgtaagttactgcaacaagttggttctagag

SEQ ID NO: 16847 - RNA, 180 nt, Aeromonas sp.
  source 1..180: mol_type = other RNA; note = Related to AP024466.1; note = Aeromonas jandaei
ccctagagtcaattaaatattccagttaaagcccccttggtctggcagttggcacatcccgtgctgacgttaacctggaggtttaaatgagtaaacgtaagaaaaagtgtgttggtaagaacgctaagcgctcacatcgagagaatgagcgtaagttactgcaacaagttgattctagag

SEQ ID NO: 16848 - RNA, 196 nt, unidentified
  source 1..196: mol_type = other RNA; note = Related to RBJB01000003.1; note = Marinobacter nauticus
tacccgaagtcaatcatttaattcctgttccgttgaagtttggtctggcgctctacgtgagcataaacctactaaaatacggaggaccttatggtctatttaaagctagaagtgcaagtatcaatcagtggtaacgagaacggtcctgacctgactgagaagaaagggaaggatgaaatgcaagttgactcgggta

SEQ ID NO: 16849 - RNA, 198 nt, unidentified
  source 1..198: mol_type = other RNA; note = Related to NZ_VZZZ01000001.1; note = Marinobacter changyiensis
tactcgtagtcaatgtatatattcctgtttcggggaagtttggtctggcgctcctaggagcctaaatccattaacttaaccggaggatccacatggatcatttcaaaatagaaatacaggtaacattcgtaaacaaagagaacgcatccaagctgaatgagaatgatgctaagggtgtgaaacaagttgactcgagta

SEQ ID NO: 16850 - RNA, 196 nt, unidentified
  source 1..196: mol_type = other RNA; note = Related to NZ_LAPT01000169.1; note = Pokkaliibacter plantistimulans
tactcaaggtcaattatttttttaatccctgaatgctttggaacgtggtctggagccctacttttggggccataactaacgcagaaggagcatgttatgaatatttctattcgtatttctatcgtaaaattgaacaagggcaaatccaatccaaccgagagggaggtgcggattaaaaagcaaattgacctgagta

SEQ ID NO: 16851 - RNA, 196 nt, Pseudomonas sp.
  source 1..196: mol_type = other RNA; note = Related to CP033104.1
cacttgagctaatagtaatattccttgactgcttactccacttggtctggccacagatgcgaatttctcgcttctgcatgctgagaggataaagcgatgttttacatgaaacctgatgtacctgtgactgttccaaaagagagcgttcccgaagtgcctagagatagtcctttgtggaaaagagttggctcaagtg

SEQ ID NO: 16852 - RNA, 195 nt, Pseudomonas sp.
  source 1..195: mol_type = other RNA; note = Related to JAEHTA010000001.1; note = Pseudomonas monteilii
cactaaagccaatattactattccttgattgcttactccgattggtctggccgacgggggcgaattttcgtccccgcatacctgaggatgtagcgatgcttaacgcaaaaccagctgtacctgtgactgttaaacaaaagggcgttcccgaagtgactagagatagtcctctgtggaaaagaattggctctagtg

SEQ ID NO: 16853 - RNA, 196 nt, Pseudomonas sp.
  source 1..196: mol_type = other RNA; note = Related to NZ_CP077075.1; note = Pseudomonas xanthosomae
cgcttgagtccaatattaatattccttgaatgcttaatccgcttggtctggccacaagagcatttcgctcttggttgctaagaggaaaaagctatgcgtaaagctaaatcagatgtacctgtgactgttacagaaaaagagagcattccggaagtaactagagatagttctccttggaaaaaaattggctcaagtg

SEQ ID NO: 16854 - RNA, 197 nt, Pseudomonas sp.
  source 1..197: mol_type = other RNA; note = Related to NZ_UWAB01000407.1; note = Pseudomonas viridiflava
cattcaagtcaatattaatattccctgatctgcttgatccaattggtctggcgtcggaggtgaattcctcgccttcgcgtgctgaaaggaaaaagcgatgcttcaaatcaaaatcgttgtacttgtgactggtaacaaagagagcgttcgtggggtgcctagagatagtccctcgcggaaaagaattgactcgaatg

SEQ ID NO: 16855 - RNA, 196 nt, Pseudomonas sp.
  source 1..196: mol_type = other RNA; note = Related to AE016853.1; note = Pseudomonas syringae
catttgagtcaatacaaatattccttgagatgcttaatccaattggtctggccgtgacgacagaattctctgtcttcacaacaagagggtttcgcaatgttcgatgttaaaattgaaatacatatggctggtagaaagaagagcattcccgtagtagctagagatagcacatcggggaaaagaattggctcaaatg

SEQ ID NO: 16856 - RNA, 190 nt, Pseudomonas sp.
  source 1..190: mol_type = other RNA; note = Related to CP054472.1; note = Pseudomonas aeruginosa
cacttgagctgataatattattccttgcttattttctcttggtctggcggaggggtaattccgccccttcatagcctggagtgaatagaaatgatatttttcaatatcaacatatacgtgactagtaaagaaaagagcattcgctcagaagctagagatagctctgttgtgaaagggattagctcaggtg

SEQ ID NO: 16857 - RNA, 190 nt, Pseudomonas sp.
  source 1..190: mol_type = other RNA; note = Related to JAHUVZ010000002.1
cacctgagctgataatattattccttggttatatttctcttggtctggcggagaggtaatttcgcctcttcaaaacctggagtaaatagaatgatattttttaatatcaacatatacgtgactagtaaagaaaagagcattcgtgcggaagttagagatagctccgttacgaaagggattagctcaggtg

SEQ ID NO: 16858 - RNA, 192 nt, Pseudomonas sp.
  source 1..192: mol_type = other RNA; note = Related to NC_018028.1; note = Pseudomonas stutzeri
cacctgagataataatattgttccttgtttgatttctcttggtctggcgacagtcgacattccgccggctgcaaatcaagaggttttaaaagatgatatatttcaatatcaacgtatatgtgacttacgagaaaaagagcattcttccgaaaaccagagatggttccggtgagaaaagggttatctcaggtg

SEQ ID NO: 16859 - RNA, 190 nt, Pseudomonas sp.
  source 1..190: mol_type = other RNA; note = Related to QJRF01000029.1; note = Pseudomonas taiwanensis
cacctgaattaataatattgttccttgtgctcaaactcttggtctggcgacagataacacccgttatctgcatatcaggaggactgaagaatgattttcttcaacatcgtaataaacgtgactggttgttctaagagcgttcgttcggaagtgggagaccgccccgatacggaaagggttagttcaggtg

SEQ ID NO: 16860 - RNA, 193 nt, Pseudomonas sp.
  source 1..193: mol_type = other RNA; note = Related to NZ_FRBQ01000013.1; note = Pseudomonas punonensis
cacctgagttaataatattgttccttgtgcttcaactcttggtctggcgacaggtgacaatcgtcacttgcatatcgagagggtaataagatgatagttgtcaatgtcgtcatcaacgtgactggttgtaaaaaagagagcattcgcccggaagtgggagaccgccccgaagcgaaaagggttaattcaggtg

SEQ ID NO: 16861 - RNA, 197 nt, Pseudomonas sp.
  source 1..197: mol_type = other RNA; note = Related to QTSW01000011.1; note = Pseudomonas lactis
catctaaaccaatattaatattctttgtgctaaagctcttccttggtctggctacaggtatgcattccgcaaacctgattgcaaggagaactaaccgatgattatcatcagtgttaatgtgcgcgtgactggtaaaaaaaagagcattcctaagaactccagagatggggtcggtcggaaaaaaattggtttagatg

SEQ ID NO: 16862 - RNA, 195 nt, Pseudomonas sp.
  source 1..195: mol_type = other RNA; note = Related to NZ_CP043571.1; note = Pseudomonas migulae
catctgaaccaatattaatattctttgtgcttaaattcttccttggtctggctacaggtaggcattccgtttacctgctgcaaggagaaaacttgatgatcttcatcaatgtaaacatcaccgtgactggtaaaaatgagagcattccttcgaagtccagagatggggtcggtgggaaaaaaattggttcggatg

SEQ ID NO: 16863 - RNA, 193 nt, Pseudomonas sp.
  source 1..193: mol_type = other RNA; note = Related to CP073082.1; note = Pseudomonas aeruginosa
cacctagttcaatattaatatcccttgtctccggcggaattggtctggcgcgtcctagtggcgcatatatcaattacttaaggagttataacgatgtatattctggttgttgtaaaattttctaagaaagtaaagagcactcagccggttggtggagacactactggattgggcaaaaaaattgtactaggtg

SEQ ID NO: 16864 - RNA, 191 nt, Pseudomonas sp.
  source 1..191: mol_type = other RNA; note = Related to NZ_CP027733.1
ctcttaagtcaatatacatattccttgctgtttctctctttggtctggccggacatcgcacttttgcgttgttcattcgaggagaaaagcgatgtataaactacatgttgtaatctacgtgactagaaaaaataagagcattcgtacgaagcttggagacaggctcgcaacgaaaggaattgacttaagag

SEQ ID NO: 16865 - RNA, 204 nt, unidentified
  source 1..204: mol_type = other RNA; note = Related to NZ_OBMO01000006.1; note = Alcanivorax xenomutans
tatctagcactagtaagaatattccttctgatcactccttggtctggcggtggtgcaattcagcatcatcacaactaaaaaggagaactcgaatgcatttattaatgtatttcaaaattaagatcagcctaacgttttgtaaaaagagctcgagcgaccatcccttagaagggtggccagctgacaagcaaactatgctagata

SEQ ID NO: 16866 - RNA, 185 nt, unidentified
  source 1..185: mol_type = other RNA; note = Related to NZ_FUKJ01000432.1; note = Crenothrix polyspora
ccatataatcaatatttatattctcgcgttccttttgttggtctggcgtggcgtttgccacaattaacttcaatcgaggaaacaaatgcaaaataatattcatattaccgtagtaattaaagcaactgagagcaacgatttgcaacagccccacgctgtacaagttgaaaaacaagttgattcgg

SEQ ID NO: 16867 - RNA, 190 nt, unidentified
  source 1..190: mol_type = other RNA; note = Related to PERX01000093.1; note = Methylobacter sp.
caaaataatcaatccttatattctcgtctcctaagttattggtctggcgtggcatagccacaaatccccttaacagaataaaggtaaacaaatgaacactgatattaaaatcaccgtagtaatcaaaaaaaccgagagcaacgatttacaacagccccaagctgttaaagtcgaaagacaagttgatttg

SEQ ID NO: 16868 - RNA, 177 nt, unidentified
  source 1..177: mol_type = other RNA; note = Related to NZ_CP014360.1; note = Methylomonas sp.
ccaaataatcaatctcaatattctcgtttccttagttattggtctggcattttttaaccctaaccaaggagatagcaatgaaatgtgacattcacattaacgtagtaattaatgaagtcaagagtataagtttgcaacagccccacgctttgcaaacgaaacaacaagttgatttgg

SEQ ID NO: 16869 - RNA, 175 nt, unidentified
  source 1..175: mol_type = other RNA; note = Related to JACYUQ010000012.1; note = Oxalobacteraceae bacterium
tgtccatccaatagttgtatccccatttctccgaagcttggtctggcccatttcaaccagcaaaggagtaataacatgaaccatcgttataaaatgacgttctcatttgagaaaaaaagcagtaaagacaatcggagcggttcggttgaaactgacctgcgagttggatcggaca

SEQ ID NO: 16870 - RNA, 213 nt, unidentified
  source 1..213: mol_type = other RNA; note = Related to NZ_AQXY01000025.1; note = Thioalkalivibrio sp.
tgcctgattccaatacaccaattcccgatgctctgaatgtttggtctggcgctaaacgaaatccgtcgtttagccaaaaacataaggagtaacaaatgaaacgagcaatcgtgcatgtgtcagtgaccgtcctttttcgacaagaggacacagatagcgcggaacgtaccgctcgagagagccacgattccgaaacgcaggttggatcaggca

SEQ ID NO: 16871 - RNA, 171 nt, Escherichia coli
  source 1..171: mol_type = other RNA; note = Related to NZ_CP050193.1
ccaaagagccaatagagtttttccttgctttcctactggtctggcaaaatttcataaccaataggagttgcatcatgtttattatcaacatcaacattaacgtaaccaagagctcttcatcttgttctggagacggtcagatgaagaaaaaaagagaggttggctctctgg

SEQ ID NO: 16872 - RNA, 147 nt, unidentified
  source 1..147: mol_type = other RNA; note = Related to CP068315.1; note = Klebsiella pneumoniae
accaatttttccttgctttcctatggtctggcaaaatttcacaaccactaggagcagtactatgtttattttcaacatcaacatttacgtaaccaagagctcttcatcttgttccggagacggacagaagaagaaaaaaagagaggt

SEQ ID NO: 16873 - RNA, 172 nt, Escherichia coli
  source 1..172: mol_type = other RNA; note = Related to DADHSI010000124.1
cctaagcgctgatagatttattcctttggttttccctggtctgacagaaatcaaaccaaaacggagaaacaaagtatgtttaacatcaacatcaatatcactgtgattaagagcgcttcaactaaatctggagacagaaagaagaagcaaaagaaagagatcggcgctaagg

SEQ ID NO: 16874 - RNA, 173 nt, unidentified
  source 1..173: mol_type = other RNA; note = Related to NZ_CP083739.1; note = Hafnia paralvei
ccctaaagccaattgatttattccttgtgttccttactggtctggcaaaacccataacccaagaaggaaggcaaaaatgttaaattttaacatcaacttaagtgtaactaagacctataactatgcatctggagacagtcatagtcgtagaaaagaagggattggctttatgg

SEQ ID NO: 16875 - RNA, 177 nt, unidentified
  source 1..177: mol_type = other RNA; note = Related to MECU01000027.1; note = Shigella sp.
ccctaaagccaattgatttattccttgtgttccttactggtctggcaaaacccaacaaccaaagaaggaagactagaatgtttaaatttaacatcaacttaagtgtaattaataagacctacaattacggaactggagacagtagtagtcgtagaaaaaaagggattggctttatgg

SEQ ID NO: 16876 - RNA, 170 nt, unidentified
  source 1..170: mol_type = other RNA; note = Related to NZ_WVWD01000013.1; note = Leclercia adecarboxylata
cccattagccaatagatgtgttccttgtcttctttcactggtcaggcaaaatttatctaaccatggagaagaaaaaatgatttcaatcaacttgaatatcaacgtgactaagagctattactcattttctggagacagaaagagtaagaaaaaagagattggcttgatgg

SEQ ID NO: 16877 - RNA, 164 nt, unidentified
  source 1..164: mol_type = other RNA; note = Related to JAGNRY010000075.1; note = Paludibacteraceae bacterium
tatagctaacaacacaattccttgttccataacggtcaggcaaaacttaaccaaccgagaggaaccaagcatgtttaatttaaatattagtatctgcagcattagtgtgacaaagagccattaccagacaactggagacagtactggtaaaattgatagcaata

SEQ ID NO: 16878 - RNA, 183 nt, unidentified
  source 1..183: mol_type = other RNA; note = Related to CP066129.1; note = Morganella morganii
ccttgagtcaataatatatcccttgttccattacggtcaggcaagttatcaacaaccgaaaaggaacaaatatgtttaatttaacaattagcattagtattaaaagcattaccatgacgaagagctactgccaaccttctggagacagagatggtagtattaacaaagggattggcttcaagg

SEQ ID NO: 16879 - RNA, 176 nt, Pseudomonas sp.
  source 1..176: mol_type = other RNA; note = Related to NZ_UUIA01000028.1; note = Pseudomonas viridiflava
ccctcagattgatagatttattccttgtcttctttatggtctggcaaaactcaaccagcaaggagatgaaccgatgatttttctcatcgtagtaaatgtaaacgtgaatggcggtacaaagagcaaagagtctgatactggagacagtcagcctctgaaaaggattgatctgaggg

SEQ ID NO: 16880 - RNA, 196 nt, unidentified
  source 1..196: mol_type = other RNA; note = Related to NZ_SOBR01000014.1; note = Chromohalobacter marismortui
tccctattccaacatttatttctttgcaaagcacaaccattggtctggcaactctagccataggggttagggggtgacaatgggagtaatgtaatgaagctaaaactaagctttaatgtgcgtctaaacattagctgtaaagagcctgcgaaatcatctagagatagaacttcgcaggaaggagttggaataggtg

SEQ ID NO: 16881 - RNA, 198 nt, unidentified
  source 1..198: mol_type = other RNA; note = Related to NZ_NSKA01000004.1; note = Halomonas sp.
tagttattccaatatttttttctttgtcacgcattaccactggtctggcaatcctgtcctaatcctgggacgggtagacaagaggtaagaagatgaaattcaacatgaatcttaacttgcgtttcagcatgggcagcaagaaagagtctcgaaagaaacctagagataggtcttttgaggaaggggttggaatagcta

SEQ ID NO: 16882 - RNA, 195 nt, unidentified
  source 1..195: mol_type = other RNA; note = Related to CP040452.1; note = Halomonas sp.
tccttaatccagtactattattctttgcattgcgcacctattggtctggcagatccctgtccatcgactgggacaaaccaagaggtatcatgatgaaaattttagtaatcattaaattgcgcaaaagcattagttgtaaagagtctgcctgcgtttctagagataggagtaggcaggaaggaactggattaggtg

SEQ ID NO: 16883 - RNA, 195 nt, unidentified
  source 1..195: mol_type = other RNA; note = Related to JABFTW010000016.1; note = Halomonas sp.
ctcacatccaacattcaattctttgcgcgtgtggaaaacctcggtctggccggtcaaccatgtcggttggctgtaacctgaggagtattacgatgaaaatcgaaaataccactgttatccgcatcagtaatagctgcaaagagtttggttcttcacctagagataggcagaaccaagaaggagttggagtgagag

SEQ ID NO: 16884 - RNA, 218 nt, unidentified
  source 1..218: mol_type = other RNA; note = Related to NZ_CP043568.1; note = Comamonas testosteroni
gtcagttgctagttgttattctcttggagccgattgagtgttgtgcggcgcattaattttgatgcgccataactcatgaggtaccaaaatgggaaatacccaaacgcaaaactgttcaaaaatcgaaatcattaatagcaatattaatgtgaacgtaacggtaaaagtgatttacgtgcgagagcaggtaaatcataaaagcagcgctcgcagctggc

SEQ ID NO: 16885 - RNA, 192 nt, unidentified
  source 1..192: mol_type = other RNA; note = Related to CP074381.1; note = Cupriavidus necator
tgccggcgcgggttatttgctctctttcgtgactcgtttaggtgtaggcggatttgcttgcaaatctataaccgaaaacgaggtatcacatgacaaatattgttgtaaacgtaaccactattgttgttcagaactcagttgtgagtggtcgggaggccgccattcgcaatgataagcccgccagcgtcggca

SEQ ID NO: 16886 - RNA, 153 nt, Vibrio parahaemolyticus
  source 1..153: mol_type = other RNA; note = Related to KK081893.1
actctttagcttaggactatttagtctagtcgggtgtttagccagactctaatttattgaacgggtttatggttgcgataggttcgcaacctgatctcctcactacgttcgtcaatcaggttgcgaacctatcgcttcctctagtaaagagtt

SEQ ID NO: 16887 - RNA, 153 nt, Aeromonas sp.
  source 1..153: mol_type = other RNA; note = Related to NZ_JTBG02000005.1; note = Aeromonas caviae
gctctttagcttaggacaaatttgtctagtcgggtgtttagccagactctaatttattgaacggttttatggttgcgataggttcgcaaccagatctcctcactccgttcgtcaatctggttgcgaacctatcgcttcctctagtaaagagtt

SEQ ID NO: 16888 - RNA, 153 nt, Vibrio sp.
  source 1..153: mol_type = other RNA; note = Related to AAXMWT010000001.1; note = Vibrio vulnificus
actctttagcttaggacgaattcgtctagtcgggtgtttagccagactctaatttattgaacggttttatggttgcgataggttcgcaaccagatctcctcactccgttcgtcaatctggttgcgaacctatcgcttcctctagtaaagagtt

SEQ ID NO: 16889 - RNA, 153 nt, unidentified
  source 1..153: mol_type = other RNA; note = Related to PZOH01000095.1; note = Photobacterium damselae
gctctttagcttcggacgaattcgtctagtcgggtgtttagccagactctaacttattgaacggttttatggttgcgataggttcgcaaccagatcttctcactccgttcggcaatctggttgcgaacctatcgcttcctttagtaaagagtt

SEQ ID NO: 16890 - RNA, 153 nt, Vibrio sp.
  source 1..153: mol_type = other RNA; note = Related to NZ_RSFA01000069.1; note = Vibrio pectenicida
gctctttagcttaggacgaattcgtctagtcgggtgtttagccagactctaatttattgaacggttttatggttgcgataggttcgcaacctgatctcctcactccgttcgtcaatcaggttgcgaacctatcgcttcctctagtaaagagtt

SEQ ID NO: 16891 - RNA, 153 nt, unidentified
  source 1..153: mol_type = other RNA; note = Related to WMCU01000006.1; note = Photobacterium phosphoreum
gctctttagcttaggacgaattcgtctagtcgggtgtttagccagactctaatttattgaacggtgttatggttgcgataagttcgcaacctgatctcctcactccgttcgtcagtcaggttgcgaacttatcgcttcctctagtaaagagtt

SEQ ID NO: 16892 - RNA, 145 nt, unidentified
  source 1..145: mol_type = other RNA; note = Related to WOBA01000001.1; note = Aliivibrio fischeri
actctttagcttaggacgaattcgtctagtcgggtgtttagccagactctaatttattgaacggcattatggttgcgataggtccgcaacctgatctcgttcctcaatcaggttgcgaacctatcgcttcctctagtaaagagct

SEQ ID NO: 16893 - RNA, 153 nt, Vibrio sp.; identical to SEQ ID NO: 16890
  source 1..153: mol_type = other RNA; note = Related to NZ_CP051108.1; note = Vibrio fluvialis

SEQ ID NO: 16894 - RNA, 153 nt, unidentified
  source 1..153: mol_type = other RNA; note = Related to NZ_MUFR01000019.1; note = Salinivibrio costicola
gctctttagcttaggacgaatccgtctagtcgggtgtttagccagactctaatttattgaacggttttatggttgcgataggttcgcaacctgatctcctcactccgttcgtcaatcaggttgcgaacctatcgcttcctctagtaaagagtt

SEQ ID NO: 16895 - RNA, 153 nt, unidentified
  source 1..153: mol_type = other RNA; note = Related to JAKRFY010000043.1; note = Pseudoalteromonas sp.
gctctttagctcaggacgaatacgtctagtcgggtgtttagccagactctaatttattgaacggttttatggttgcgataggttcgcaacctgatctcctcactccgttcgtcaatcaggttgcgaatctatcgcttcctctagtaaagagtt

SEQ ID NO: 16896 - RNA, 153 nt, unidentified
  source 1..153: mol_type = other RNA; note = Related to NZ_FLRB01000014.1; note = Marinomonas gallaica
gctctttagcttaggacgaatacgtctagtcgggtgtttagccagactctaatttattgaacggttttatggttgcgataggttcgcaacctgatctcctcactccgttcgtcaatcaggttgcgaacctatcgcttcctctagtaaagagta

SEQ ID NO: 16897 - RNA, 146 nt, unidentified
  source 1..146: mol_type = other RNA; note = Related to JABSRB010000040.1; note = Oceanospirillaceae bacterium
actctttagcttaggacgaattcgtctagtcgggtgtttagccagactctaatttattgaacggctttatggttgcgataagatcgcaacctgatctcgtacctcaatcaggttgcgatcttatcgcttcctcttagtaaagggtt

SEQ ID NO: 16898 - RNA, 145 nt, Pseudomonas sp.
  source 1..145: mol_type = other RNA; note = Related to NZ_JAEIOI010000003.1; note = Pseudomonas anguilliseptica
gctctttagcttaggacgaactcgtctagtcgggtgtttagccagactctaagttattgaacgagattgtggttgcgatagtctcgcaacctgatttcgttcctcaatcaggttgcgagactatcgcttcctctagtaaagagtt

SEQ ID NO: 16899 - RNA, 145 nt, Pseudomonas sp.
  source 1..145: mol_type = other RNA; note = Related to NZ_FRBQ01000002.1; note = Pseudomonas punonensis
gctctttagcttaagacgaatccgtctagtcgggtgtttagccagactctaagttattgaacgacattgtggttgcgatagtctcgcaacctgatctcgttcctcaatcaggttgcgagactatcgcttcctctagtaaagagtt

SEQ ID NO: 16900 - RNA, 145 nt, Pseudomonas sp.
  source 1..145: mol_type = other RNA; note = Related to NZ_JACKQK010000005.1
gctctttagcttaagacgattccgtctagtcgggtgtttagccagactctaagttattgaacgattttgtggttgcgatagtctcgcaacctgatctcgttcctcaatcaggttgcgagactatcgcatcctctagtaaagagct

SEQ ID NO: 16901 - RNA, 146 nt, unidentified
  source 1..146: mol_type = other RNA; note = Related to NZ_FRDS01000164.1; note = Moritella viscosa
gctctttagcttaagacgaatttcgtctagtcgggtgtttagccagactctaatttattgaacgacattatggttgcgatatgttcgcaaccagatctcgtacctcaatcaggttgcgaacatatcgcttcctctagtagagagca

SEQ ID NO: 16902 - RNA, 146 nt, unidentified
  source 1..146: mol_type = other RNA; note = Related to NZ_WEIA01000002.1; note = Pseudoalteromonas maricaloris
gctctttagcttaggacgaaattcgtctagtcgggtgtttagccagactctaatttattgaacgactttatggttgcgatatgttcgcaaccgtcattcgttcctcatgaaggttgcgaacatatcgcttcctctagtaaagagca

SEQ ID NO: 16903 - RNA, 146 nt, unidentified
  source 1..146: mol_type = other RNA; note = Related to JAERPS020000004.1; note = Rheinheimera sp.
gctctttagcttaggacgacattcgtctagtcgggtgtttagccagactctaatttattgaacgactttatggttgcgatatgttcgcaaccgtctttcgttcctcaagaaggttgcgaacatatcgcttcctctagtaaagagca

SEQ ID NO: 16904 - RNA, 147 nt, unidentified
  source 1..147: mol_type = other RNA; note = Related to NHNK02000003.1; note = Marinomonas agarivorans
tctctttagttttagggcgaaattcgtctagtcgggtgtttagccagactctaacttattgaacgactttatggttgcgatatgtgcgcaaccattactcgttcctcatgatggttgcgcacatatcgcggcctctagtaaagagct

SEQ ID NO: 16905 - RNA, 142 nt, unidentified
  source 1..142: mol_type = other RNA; note = Related to JAESQF010000097.1; note = Oleispira sp.
actctttagctttggacgaatttgtctagtcgggtgtttagccagactctaatttattgaacggttttgtattgcgagacatcgcgatctaagctcgttcctcacttagatcgcgatgcctcgcgatcttgagtaaagagta

SEQ ID NO: 16906 - RNA, 146 nt, unidentified
  source 1..146: mol_type = other RNA; note = Related to NZ_AULO01000011.1; note = Marinospirillum minutulum
actctttagaactaggacgaattcgtctagtcgggtgtttagccagactctaacttattgaacgggtttatgcttgcggtgtttccgcaaccttaactcgttcctcattaaggttgcggaaacaccgcttcctctagtaaagagca

SEQ ID NO: 16907 - RNA, 151 nt, unidentified
  source 1..151: mol_type = other RNA; note = Related to NZ_RPGH01000128.1; note = Candidatus Enterovibrio escacola
gctctttagcgttggacgatattcgtattcgtctagtcgggtgctcagccagactctaacttattgaacgacttgacggtgcgatatgttcgcaaccttcactcgttcctcatgaagcttgcgaacatatcgcattctctagtaaagggct

SEQ ID NO: 16908 - RNA, 143 nt, Chromobacterium sp.
  source 1..143: mol_type = other RNA; note = Related to JAHDTB010000015.1; note = Chromobacterium subtsugae
gctctctagcttaggactctatgtccagtcgggtgtttagccagactctaatttattgaacggtttggggttgcgaaagactcgcatcctaaactcgttcctcatttaggatgcgagtctttcgcttcctctagtagagagtg

SEQ ID NO: 16909 - RNA, 145 nt, unidentified
  source 1..145: mol_type = other RNA; note = Related to NZ_CP019697.1; note = Paenalcaligenes hominis
actctttagcgtatgacggattacgtcagtcgggtgtttagccagactcaaatttattgaacggttttggggttgcgctaggcgcacaaccttaactcgttcctcattaaggttgtgcgcctagcgcttcctttagtaaagagta

SEQ ID NO: 16910 - RNA, 144 nt, unidentified
  source 1..144: mol_type = other RNA; note = Related to CP065725.1; note = Oligella ureolytica
actctttagcgtatgacggaatacgtcagtcgggtgattagccagactcaaattgattgaacgggtttaaagttgcgtgatgtacgctttcttagctcgttcctcgccaagaaagcgtacatcacgctctttcaagtaaagagt

SEQ ID NO: 16911 - RNA, 145 nt, Aeromonas sp.
  source 1..145: mol_type = other RNA; note = Related to NZ_CP083625.1; note = Aeromonas enteropelogenes
gctctttagcgttggacggttacgtctagtcgggtgcttagccagactctaagttattgaacggcattatggttgcgatagtctcgccacctaatctcgttcctcgtttaggtggcgagactatcgcttcctctagtaaagagct

SEQ ID NO: 16912 - RNA, 96 nt, unidentified
  source 1..96: mol_type = other RNA; note = Related to FO818637.1; note = Xenorhabdus bovienii
gctctttagcggtttggacaaacttcgtctagtcgggtgattagccagactctaacttattgaacacgtttaattcgctgtctttagtaaagagta

SEQ ID NO: 16913 - RNA, 101 nt, unidentified
  source 1..101: mol_type = other RNA; note = Related to CACVAY010000001.1; note = Thiotrichaceae bacterium
attgaacggctttagggtgcgatgttttcgcattctaagctcgtcagcttgttgcttcctcccttagaatgcaaaaacatcgcagtctttagtaaagagcc

SEQ ID NO: 16914 - RNA, 145 nt, Vibrio sp.
  source 1..145: mol_type = other RNA; note = Related to AAXMUQ010000002.1; note = Vibrio alginolyticus
actctttagtgttggacgcaaattcgtctagtcgggtgattagccagactcaaatttattgaacgggtttaaatgcgaggtgtacgcatcctaaactcgttcctcctttaggatgcgtacacctcgcaccttctagtaaagagcc

SEQ ID NO: 16915 - RNA, 144 nt, Vibrio sp.
  source 1..144: mol_type = other RNA; note = Related to NZ_CP022741.1
actctttagtgtaagacgtaattcgtctagtcgggtgattagccagactcaaatttattgaacaggtttaaatgcgaggtgtacgcatcctaaactcgttcctcctttaggatgcgtacacctcgcactctttagtaaagagtt

SEQ ID NO: 16916 - RNA, 107 nt, Chromobacterium sp.
  source 1..107: mol_type = other RNA; note = Related to NZ_MUKV01000069.1; note = Chromobacterium haemolyticum
actctttagtgtaggacggtcatcgtctagtcgggtgtttagccagactctaacttattgagcggatttatggttgcgataggatcgcatcctcctagtaaagagcc

SEQ ID NO: 16917 - RNA, 155 nt, unidentified
  source 1..155: mol_type = other RNA; note = Related to PBYJ01000041.1; note = Oceanospirillaceae bacterium
gctctttagcgttggactgcttaagtctagtcgggtgattagccagactctaacttattgaacgggtttagggttgcgaaatgaacgcagcgcagcctaaacctgttcggtttaggctgcgctgcgttcatttcgcggcctcttagtgaagagct

SEQ ID NO: 16918 - RNA, 155 nt, unidentified
  source 1..155: mol_type = other RNA; note = Related to NZ_FTMN01000018.1; note = Marinobacterium stanieri
gctctttagtgttggactgtacaagtctagtcgggtgattagccagactctaacttattgaacgggtttagggttgcgaaatgaacgcagcgcagcctaaacctgttcggtttaggctgcgctgcgttcatttcgcggcctcttagtaaagagcg

SEQ ID NO: 16919 - RNA, 146 nt, unidentified
  source 1..146: mol_type = other RNA; note = Related to NZ_WHZZ01000002.1; note = Photorhabdus khanii
actctttagcgttggacgtattacgtctagtcgggtgattagccagactctaacttattgaacgtatttagggttgcgaaagtgtcgcacccctcactcgttcctccttcgggttgcgacactttcgcttcctctagtaaagagtt

SEQ ID NO: 16920 - RNA, 146 nt, unidentified
  source 1..146: mol_type = other RNA; note = Related to NZ_JAFBFW010000005.1; note = Pantoea coffeiphila
actctttagcgttggacgtattacgtctagtcgggtgattagccagactctaacttattgaacgtatttggggttgcgaaagtgtcgcaaccctcactcgttcctccttcgggttgcgacactttcgcttcctttagtaaagagtt

SEQ ID NO: 16921 - RNA, 145 nt, unidentified
  source 1..145: mol_type = other RNA; note = Related to NZ_LMLK01000022.1; note = Erwinia sp.
actctttagcgtggacgtattacgtctagtcgggtgattagccagactctaacttattgaacgcatttggggttgcgaaagtgtcgcacccctcactcgttcctccctcgggttgcgacactttcgcttcctccagtaaagagtt

SEQ ID NO: 16922 - RNA, 146 nt, unidentified
  source 1..146: mol_type = other RNA; note = Related to DAFWUX010000006.1; note = Klebsiella variicola
actctttagcgttggacggctttcgtctagtcgggtgtttagccagactctaatttattgagcgtatttggggttgcgaaagtgtcgcacccctcgctcgttcctccctcgggttgcgacactttcgcttcctccagtaaagagtt

SEQ ID NO: 16923 - RNA, 146 nt, Citrobacter sp.
  source 1..146: mol_type = other RNA; note = Related to UFVV01000001.1; note = Citrobacter koseri
actctttagcgttgggcgttttacgtctagtcgggtgattagccagactctaacttattgagcgaatttggggttgcgaaagtgtcgcccccctcactcgttcctccctcgggttgcgacactttcgcttcctccagtaaagagtg

SEQ ID NO: 16924 - RNA, 146 nt, unidentified
  source 1..146: mol_type = other RNA; note = Related to NSCM01000023.1; note = Photorhabdus bodei
actctttagcgttggacgtcttacgtctagtcgggtgattagccagactctaacttattgaacgcattaagggttgcgaaagtgtcgcaacctgaactcgttcctccttcaggttgcgacactttcgcttcctccagtaaagagcc

SEQ ID NO: 16925 - RNA, 145 nt, unidentified
  source 1..145: mol_type = other RNA; note = Related to NZ_JXSK01000003.1; note = Photorhabdus luminescens
actctttagcgttggacgtttacgtctagtcgggtgattagccagactctaacttattgaacgcattaagggttgcgaaagtgtcgcaaccctctctcgttcctccctcgggttgcgacactttcgcttcctctagtaaagagtc

SEQ ID NO: 16926 - RNA, 145 nt, Citrobacter sp.
  source 1..145: mol_type = other RNA; note = Related to CP047307.1; note = Citrobacter freundii
actctttagcgttggacggtaacgtctagtcgggtgattagccagactctaacttattgaacgtattaagggttgcgaaagtgtcgcaacccgagatcgttcctctctcgggttgcgacactttcgcttcctctagtaaagagtg

SEQ ID NO: 16927 - RNA, 146 nt, unidentified
  source 1..146: mol_type = other RNA; note = Related to NZ_CP023467.1; note = Dickeya dadantii
gctctttagtgttggacgtattacgtcttgtcgggtgattagccagacactaatttattgaacgtatttagggttgcgaaagtgtcgcaacctgaattcgttcctccttcaggttgcgacactttcgcttcctctagtaaagagtc

SEQ ID NO: 16928 - RNA, 146 nt, unidentified
  source 1..146: mol_type = other RNA; note = Related to NZ_DF820431.1; note = Serratia liquefaciens
gctctttagtgttggacgtattacgtcttgtcgggtgattagccagacactaatttattgaacgtatttagggttgcgaaagtgtcgcaacctgaactcgttcctccttcaggttgcgacactttcgcttcctctagtaaagagtg

SEQ ID NO: 16929 - RNA, 146 nt, Aeromonas sp.
  source 1..146: mol_type = other RNA; note = Related to NZ_CDDH01000001.1; note = Aeromonas australiensis
gctctttagcgttggacgtattacgtcttgtcgggtgattagccagacaccaatttattgagcgtttttagggttgcgaaagtgtcgcaacccgaactcgttcctccttcaggttgcgacactttcgcttcctctagtaaagagtt

SEQ ID NO: 16930 - RNA, 146 nt, unidentified
  source 1..146: mol_type = other RNA; note = Related to JAGTSE010000026.1; note = Proteobacteria bacterium
gctctttagtgttggacgtattacgtcttgtcgggtgattagccagacactaatttattgaacgcatttagggttgcgaaagtgccgcaacctgaactcgttcctccttcaggttgcggcactttcgcttcctctagtaaagagtc

SEQ ID NO: 16931 - RNA, 147 nt, Proteus sp.
  source 1..147: mol_type = other RNA; note = Related to CVRY01000004.1; note = Proteus penneri
actctttagcgtaggacatattatgtcttgtcgggtgattagccagacactaatttattgctcacatttagggttgcgaaagtatcgcaacctgatctcgcgagctccttcaggttgcgatactttcgcttcttctagtaaagagta

SEQ ID NO: 16932 - RNA, 187 nt, unidentified
  source 1..187: mol_type = other RNA; note = Related to NZ_WOBT01000016.1; note = Aliivibrio fischeri
gctctttagcttatgacgaacacgtctagtcgggtgattagccagactctaacttattgaacggttttagttgcgaaatgtacgtatttcttcnnnnnnnnnnnnnnnnnnnnnnnnnnnnnnnnnnnnnnnnnnnnnnnnnnnnnnngaagaaatacgtacatttcgctgtctctagtaaagagct

SEQ ID NO: 16933 - RNA, 164 nt, Vibrio sp.
  source 1..164: mol_type = other RNA; note = Related to NZ_LT960611.1; note = Vibrio tapetis
gctctttagcttaagacgaattacgtctagtcgggtgattagccagactctaacttattgaacgggattggttgcgaaatgtacttacttcttcgcgatccaaactcgttcctcctttagaccgcgaagaagtaagtacatttcgctgtctctagtaaagagct

SEQ ID NO: 16934 - RNA, 161 nt, Vibrio sp.
  source 1..161: mol_type = other RNA; note = Related to BGNF01000084.1; note = Vibrio harveyi
gctctttagcttaagacgaacacgtctagtcgggtgattagccagactctaacttattgaacggttttagttgcgaaatgtacgtacttcttcgcagccaaactcgttcctcatttgactgcgaagaagtacgtacatttcgctgtctctagtaaagagct

SEQ ID NO: 16935 - RNA, 164 nt, Vibrio sp.
  source 1..164: mol_type = other RNA; note = Related to NZ_CP045070.1; note = Vibrio harveyi
gctctttagcttaggacgaattacgtctagtcgggtgattagccagactctaacttattgaacgagattagttgcgaaatgtacttacttcttcgctgcctaaactcgttcctcctttaggcagcgaagaagtaagtacatttcgctgtctctagtaaagagct

SEQ ID NO: 16936 - RNA, 164 nt, Vibrio sp.
  source 1..164: mol_type = other RNA; note = Related to NZ_CP009264.1; note = Vibrio coralliilyticus
gctctttagcttaggacgaattacgtctagtcgggtgattagccagactctaacttattgaacgggattagttgcgaaatgtagttacttcttcgcggtctaaactcgttcctcctttagaccgcgaagaagtaactacatttcgctgtctctagtaaagagct

SEQ ID NO: 16937 - RNA, 165 nt, Vibrio sp.
  source 1..165: mol_type = other RNA; note = Related to NZ_CP027030.1; note = Vibrio vulnificus
gctctttagcttaggacgaatttcgtctagtcgggtgattagccagactctaacttattgaacgggattgggttgcgaaatgctcgtacatcttcgcagcctagactcgttcctcccttaggctgcgaagatgtacgagcatttcgctgtctctagtaaagagct

SEQ ID NO: 16938 - RNA, 164 nt, unidentified
  source 1..164: mol_type = other RNA; note = Related to NZ_CP080413.1; note = Shewanella sp.
gctctttagcttaggacgaatttcgtctagtcgggtgattagccagactctaacttattgaacgggaatggttgcgaaatgttcgtacttcttcgcaccctaaactcgttcctcctttaggctgcgaagaagtacgaacatttcgctgtctctagtaaagagct

SEQ ID NO: 16939 - RNA, 143 nt, unidentified
  source 1..143: mol_type = other RNA; note = Related to NZ_LS483250.1; note = Moritella yayanosii
gctctttagcgtaagacgatttcgtctagtcgggtggttagccagactctaatttattgaacgtatttggttgcgaaatattcgcagcataaactcgttcctcctttaggccgcgaacatatcgctgtctctagtaaagagtt

SEQ ID NO: 16940 - RNA, 144 nt, Vibrio sp.
  source 1..144: mol_type = other RNA; note = Related to DACQYM010000007.1; note = Vibrio vulnificus
gctctttagctaatgacgaacatcgtctagtcgggtggttagccagactcaaatttattgaacggttttcgatgcttggtatacgcatcctaaactcgttcctcctttaggatgcgtataccaagcacccttaagtaaagagtt

SEQ ID NO: 16941 - RNA, 144 nt, Vibrio sp.
  source 1..144: mol_type = other RNA; note = Related to PIFQ01000001.1; note = Vibrio splendidus
gctctttagcttatgacgaatttcgtctagtcgggtgattagccagactcaaatttattgaacgggtttcgatgctgtgtacacacatcccaaactcgttcctcctttaggatgcatgtacacagcacccttaagtaaagagtt

SEQ ID NO: 16942 - RNA, 143 nt, Enterobacter cloacae
  source 1..143: mol_type = other RNA; note = Related to JAKMJP010000001.1
tgtctttagcgtaaacgggttacaatgtcgggtggttagccagactctaatttattgaacgagttacacgtgcgatgtgttcgcatcccaaactcgttgcctcgtttgggatgcgaacacatcgcaaaccttagtaaagattc

SEQ ID NO: 16943 - RNA, 143 nt, Enterobacter sp.
  source 1..143: mol_type = other RNA; note = Related to JAJCXF010000001.1
agtctttagcgtaaacgagttacaatgtcgggtgtttagccagactctaatttattgaacgagttacacgtgcgatgtgttcgcatcccaaactcgttgcctcgtttgggatgcgaacacatcgcaaaccttagtaaagattc

SEQ ID NO: 16944 - RNA, 145 nt, Vibrio sp.
  source 1..145: mol_type = other RNA; note = Related to JAKEUX010000006.1; note = Vibrio brasiliensis
gctctttagtgttttgacggactttgtctagtcgggtgtttagccagactctaacttattgaacgagtttacatgcgatgtgtacgcatccaaaactcgttcctcgtttcggatgcgtacacatcgcaccctttagtaaagagct

SEQ ID NO: 16945 - RNA, 147 nt, unidentified
  source 1..147: mol_type = other RNA; note = Related to NZ_CAKODS010000001.1; note = Kosakonia cowanii
gctctttagcgtaaaacgagttaaacattgtcgggtgattagccagacactaacttattgaacgagttaaatttgcgatgcattcacatcccaaactcgtctcgctcgtttaggatgcgaacgcatcgcaccctttagtaaagagcg

SEQ ID NO: 16946 - RNA, 146 nt, Citrobacter sp.
  source 1..146: mol_type = other RNA; note = Related to JAASMA010000001.1; note = Citrobacter koseri
gctctttagcgtaaacgggttacaacttgtcgggtgattagccagacactaacttattgaacgagttaaatttgcgatgtattcgcatcccaaactcgtttcgctcgtttgggatgcgaacacatcgcaccctttagtaaagagtc

SEQ ID NO: 16947 - RNA, 148 nt, Vibrio sp.
  source 1..148: mol_type = other RNA; note = Related to MCZP01000152.1; note = Vibrio breoganii
gctctttagcgtaaacgagattcaaaatagtcgggtgtttagccagactctaacttattgaacgggttatattgcggtgtgttcacatcccaaactcgctctcgctcgtttgggatgcaaacacaccgcaaccctttagttaagagta

SEQ ID NO: 16948 - RNA, 137 nt, Vibrio parahaemolyticus
  source 1..137: mol_type = other RNA; note = Related to NZ_QPQH01000001.1
gctctttagcgtttttatattagtcgggtgattagccagactctaacttattgaacgggtttgcatgcgctgtacacgcatcccaaactcgttcctcgtttgggatgcgtgtacaccgcaccctctagtaaagagct

SEQ ID NO: 16949 - RNA, 136 nt, Vibrio sp.
  source 1..136: mol_type = other RNA; note = Related to NZ_SZZR01000017.1; note = Vibrio gallaecicus
gctctttagcgttttaatatagtcgggtgtttagccagactctaacttattgaacgggtttgcatgcgttgtaaacgcatcccaaactcgttcctcatttgggatgcatctacaacgcacccttaagtaaagagca

SEQ ID NO: 16950 - RNA, 136 nt, Vibrio sp.
  source 1..136: mol_type = other RNA; note = Related to BBSA01000008.1; note = Vibrio ishigakensis
atcctttagcgttttagaatagtcgggtgcttagccagactctaacttattgagtgggtttgaatgcgatgtgtacgcatctcaaactcgttcctcatttgagatgcgtacacatcgcacctttaagtaaaggatt

SEQ ID NO: 16951 - RNA, 140 nt, Vibrio sp.
  source 1..140: mol_type = other RNA; note = Related to MCXQ01000034.1; note = Vibrio lentus
actctttagcttaggacgaatttcgtctagtcgggtgtttagccagactctaacttattgggcactttatgattgcgaaaggtatctttgttcgcnnnnnngcgaacaaagatacctttcgcttcttttagtaaagagtt

SEQ ID NO: 16952 - RNA, 163 nt, Vibrio sp.
  source 1..163: mol_type = other RNA; note = Related to NZ_CP025953.1; note = Vibrio campbellii
actctttagcttagggcgaatttcgtctagtcgggtgattagccagactctaacttattgggcactttatgattgcgaaaggtatctttgttcgcttcatagagctcgtccctcactttatgaagcgaacaaagatacctttcgcttcttttagtaaagagtt

SEQ ID NO: 16953 - RNA, 145 nt, unidentified
  source 1..145: mol_type = other RNA; note = Related to NZ_LOFH01000001.1; note = Pseudoalteromonas sp.
gtcttttagcgaatgaggcatttatgcctagtcgggtgtttagccagactctaacttattgaacgagattgtatgcgatatctgcgcatacaaagctcgttcctcactttgtatgcgcagatatcgcattaactagtaaaagaca

SEQ ID NO: 16954 - RNA, 144 nt, Aeromonas hydrophila
  source 1..144: mol_type = other RNA; note = Related to CP000462.1
gctctttagcttgagacgttttcgtcaagtcgggtgattagccagactcaaatttattgggcggtttaaggttgcgaaaggtccgcgccctaaactcgtacctcctttagggcgcgaacctttcgcctcctgtagtaaagagtc

SEQ ID NO: 16955 - RNA, 143 nt, Citrobacter sp.
  source 1..143: mol_type = other RNA; note = Related to DACSXM010000001.1; note = Citrobacter freundii
actctttagctttggacggattcgtctagtcgggtgattagccagactcaaaattattgaacgggtttaaaagcgatgtatacgcatcctaaactcgttcctcctttaggatgcgtatacatcgcattcttaagtaaagagct

SEQ ID NO: 16956 - RNA, 143 nt, unidentified
  source 1..143: mol_type = other RNA; note = Related to NZ_CP090245.1; note = Klebsiella oxytoca
actctttagctttggacgttttcgtctagtcgggtgattagccagactcaaaattattgaacgggtttaaatgcgatgtatacgcatcctaaactcgttcctcctttaggatgcgtatacatcgcattctcaagtaaagagct

SEQ ID NO: 16957 - RNA, 141 nt, unidentified
  source 1..141: mol_type = other RNA; note = Related to NZ_JABEBB010000004.1; note = Pantoea ananatis
actctttagcgtggacgttacgtctagtcgggtgttcagccagactcaaatttattgaacgggtttaaatgcaatgtatacgcatcttaaactcgttcctcctttaagatgcgtatacattgcattctttagtaaagagtc

SEQ ID NO: 16958 - RNA, 145 nt, unidentified
  source 1..145: mol_type = other RNA; note = Related to JACGVM010000019.1; note = Colwellia sp.
actctttagcttcggacaaaatttgtctagtcgggtgattagccagactctaatttattgaacgggtttatatgcgatatacatgcatcctaaactcgtacctcctttaggatgcatgcataccgcattctttaagtaaagagtg

SEQ ID NO: 16959 - RNA, 144 nt, unidentified
  source 1..144: mol_type = other RNA; note = Related to NZ_CP016181.1; note = Marinomonas primoryensis
gctctttagcttaggacgttttcgtctagtcgggtgttaagccagactctaatttattgaacgggatatggttgcgcggcaagcgcaacctagactcgttcctcgcttaggttgcgcttgccgcgcttcctctagtaaagagtg

SEQ ID NO: 16960 - RNA, 148 nt, unidentified
  source 1..148: mol_type = other RNA; note = Related to MEIT01000084.1; note = Snodgrassella alvi
aatctttagcgatatggactttattgtctagtctggtgtttagccggactcaaatttattgtgtggatttcggttgcgaaagaatcagttcctaaccccgattatcgtgcttagtaactgattctttcgcgtcctttagtaaagattg

SEQ ID NO: 16961 - RNA, 147 nt, unidentified
  source 1..147: mol_type = other RNA; note = Related to MEIK01000040.1; note = Snodgrassella alvi
aatctttagcgatacggacgtaattgtctagtctggtgcttagccggactctaatttattgagtggaattggttgcgaaagaatcagtttctaatcccgattctcggtctcagaaactgcttctttcgcgttctttagtaaagattg

SEQ ID NO: 16962 - RNA, 132 nt, unidentified
  source 1..132: mol_type = other RNA; note = Related to CP091515.1; note = Snodgrassella alvi
aatctttagcgttacagactttattgtctagtctggtgtttagccggactcaaatttattgtgtggatttggttgcgaaataaccagtttctcattcgaaactgtttatttcgcttcctttagtaaagatta

SEQ ID NO: 16963 - RNA, 142 nt, Enterobacter cloacae
  source 1..142: mol_type = other RNA; note = Related to CP010512.1
gttctctagcttggcaatcttgccttgtcgggtgtttagccagacactaagttattgaacgagtttgcatgcggtgtgtacgcattccaaactcgttccctcatttggaatgcgtacacaccgcattctcaagtagagaacg

SEQ ID NO: 16964 - RNA, 142 nt, Citrobacter sp.
  source 1..142: mol_type = other RNA; note = Related to DACSVK010000003.1; note = Citrobacter freundii
gctctttagcttgacgttttacgtcttgtctggtgatcagccagacactaagttattgaacgagtttacatgcggtatgtacgcattccaaactcgttcctcctttggaatgcgtacataccgcatcctctagtaaagagct

SEQ ID NO: 16965 - RNA, 160 nt, Acinetobacter sp.
  source 1..160: mol_type = other RNA; note = Related to JALGBR010000010.1
actctttagcttttaggacttaacaagtctagtcgggtgtttagccagactctaatttattgactgcatttgaagaacaaaagtttaaattgttcgctcatatgtttgctcacgcacatattcgcaaacaattgaaacttttgctctatagtaaagagta

SEQ ID NO: 16966 - RNA, 158 nt, Acinetobacter sp.
  source 1..158: mol_type = other RNA; note = Related to VYTC01000001.1; note = Acinetobacter junii
gctctttagctttaagacgtaaccgtctagtcgggtgtttagccagactctaatttattgattgcatttgcagaacaaaagtttaaattgttcgctcacatgtttgcttacgcacatattcgcaaacaattgaaacttttgctctatagtaaagagta

SEQ ID NO: 16967 - RNA, 146 nt, Acinetobacter sp.
  source 1..146: mol_type = other RNA; note = Related to KB851203.1; note = Acinetobacter seifertii
gctctttagcttttaggacttaacaagtctagtcgggtgtttagccagactctaatttattgaccacatttggagaacaaaagtttcaattcttcgctcatgcgaattcgcaaacaattgaaacttttgctctaaagtaaagagta

SEQ ID NO: 16968 - RNA, 152 nt, Acinetobacter sp.
  source 1..152: mol_type = other RNA; note = Related to NZ_PYIX02000002.1; note = Acinetobacter sichuanensis
gctctttagctttaggacttaacagtctagtcgggtgtttagccagactctaacttattgatgaaactcattgcaatactgcagacctaaagtttcaattcttcgctcggttctcgcaaacaattgaaactttagctctaaagtaaagagta

SEQ ID NO: 16969 - RNA, 153 nt, Acinetobacter sp.
  source 1..153: mol_type = other RNA; note = Related to LSZI01000016.1
gctctttagctttaggacttaacagtctagtcgggtgtttagccagactctaatttattgaccacatttggagaacaaaagtttaaattgttcgctcatttgctatgcgctcattcgcaaacaattgaaacttttgctctgaagtaaagagta

SEQ ID NO: 16970 - RNA, 146 nt, Acinetobacter sp.
  source 1..146: mol_type = other RNA; note = Related to CP031984.1; note = Acinetobacter haemolyticus
gctctttagctttaggacttaaccgtctagtcgggtgtttagccagactctaacttattgatgaatcacattgaagaacaaaagtttaaattgttcgctcacgttgttcgcaaacaattgaaacttttgctcttaagtaaagagta

SEQ ID NO: 16971 - RNA, 146 nt, Acinetobacter sp.
  source 1..146: mol_type = other RNA; note = Related to NZ_VPEY01000001.1
gctctttagctttgggacttaacagtctagtcgggtgtttagccagactctaacttattgatgaaacacattggagaacaaaagtttcaattcttcgctcatgtgattcgcaaacaattgaaacttttgctctaaagtaaagagcg

SEQ ID NO: 16972 - RNA, 141 nt, Acinetobacter sp.
  source 1..141: mol_type = other RNA; note = Related to CP018254.1; note = Acinetobacter baumannii
gctctttagttttaggacgtaacagtctagtcgggtgtatagccagactccaacttattgatgtttttgtgaatcagaagttttactacttcgctcatatcttcgcaaactattaaaacttctgctcattagtaaagagta

SEQ ID NO: 16973 - RNA, 141 nt, Acinetobacter sp.
  source 1..141: mol_type = other RNA; note = Related to DADATW010000032.1; note = Acinetobacter baumannii
gctctttagttctaggacgtaacagtctagtcgggtgtatagccagactccaacttattgatgttattgtgaatcagaagttttactacttcgctcatatcttcgcaaactactaaaacttctgctcattagtaaagagta

SEQ ID NO: 16974 - RNA, 148 nt, Acinetobacter sp.
  source 1..148: mol_type = other RNA; note = Related to CP009256.1; note = Acinetobacter baumannii
actctttagcttttgacttttactggtcaagtcgggtgctaagccagactctaatttattgcgtacactttaggttgcgaaacaacagcatcctaaattgcgtagcctcatttaggatgctgttgttccgcctccttagtaaagagtt

SEQ ID NO: 16975 - RNA, 148 nt, Acinetobacter sp.
  source 1..148: mol_type = other RNA; note = Related to NZ_CP090180.1; note = Acinetobacter johnsonii
actctttagcttatgacttttaccagtcaagtcgggtgttaagccagactctaacttattgcgtacactttaggttgcgaaactacagcatcctaaattacgtagcctcatttaggatgctgtagttccgcctcctgtgtaaagagtt

SEQ ID NO: 16976 - RNA, 136 nt, unidentified
  source 1..136: mol_type = other RNA; note = Related to NZ_GL883764.1; note = Parasutterella excrementihominis
gcttcttagcgtttaatagattaagtcgggtgttaagccagattgaattttcctgttggcattggagcggcctctcgccgccttaatgcctgataacagccaataaagcggcgagaggccgtctctagtaaggagc

SEQ ID NO: 16977 - RNA, 158 nt, Acinetobacter sp.
  source 1..158: mol_type = other RNA; note = Related to NZ_CP083989.1; note = Acinetobacter guillouiae
gctctttagctatgggttctatgagcctagtcgggtgttaagccagactcaaatttattgggaacattgagcgttgcgaaaggtatatacctttcgcttacatgctttcacatgttcacaaaaggtatatacctttcgcttcgtatgagtagagagta

SEQ ID NO: 16978 - RNA, 157 nt, Acinetobacter sp.
  source 1..157: mol_type = other RNA; note = Related to KI530706.1; note = Acinetobacter gyllenbergii
gctctttagttatgggttctatgggcctagtcgggtgttaagccagactcaaatttattgagagcattgagcgttgcgaaaggtagatacctttcgctcaatgttcgcacatattcgcaaaaggtatctacctttcgcttcgtatgagtagagagta

SEQ ID NO: 16979 - RNA, 160 nt, Acinetobacter sp.
  source 1..160: mol_type = other RNA; note = Related to NZ_MABW01000006.1; note = Acinetobacter baumannii
gctctttagctatgggttcatagagcctagtcgggtgttaagccagactcaaacttattgggagcattgagcgttgcgaaaggtataaacctttcgctcacatgttcctgtacatgttcgcaaaaggtttatacctttcgcttcgtatgagtaaagagca

SEQ ID NO: 16980 - RNA, 151 nt, Acinetobacter sp.
  source 1..151: mol_type = other RNA; note = Related to LWHP01000001.1; note = Acinetobacter pittii
gctctttagctttaggactttttgagtccggtcgggtgttaagccagaccctaatttattgattgccatggcgttgcgaaagtagagatacttccgctgcgcttacgcttacagaagtatctctactttcgctgcgtgtgagtaaagagca

SEQ ID NO: 16981 - RNA, 183 nt, Vibrio sp.
  source 1..183: mol_type = other RNA; note = Related to QJUD01000001.1; note = Vibrio furnissii
gctctttagtgttaatttggattgaattttcagtagtttaatctagtttggcgatgcgctaaactctcatttattgggcagatttgcagttgcggaacaagattttagacccgcaaccgctgctcatccttcgcagacgcttgcggatctaaaatcttgttccgcggcttcgagtaaagagct

SEQ ID NO: 16982 - RNA, 181 nt, Vibrio sp.
  source 1..181: mol_type = other RNA; note = Related to SYUN01000005.1; note = Vibrio kanaloae
gctctttagtgtaatttagattgaatttcaaaagtttagtctagtctggcgatgcgccaaactctcatttattgggcacatttgcagttgcggaacaacattttagacccgtaaccgctgctcatgcttcacagacgcttacggatctaaaatgttattccgcggcttctagtaaagagct

SEQ ID NO: 16983 - RNA, 180 nt, unidentified
  source 1..180: mol_type = other RNA; note = Related to PYNL01000004.1; note = Photobacterium kishitanii
gctctttagcgtaattttgattagataaatctatttaatcttgtttggcgttgcgccaaacactcatttattgggcagatttacagttgcggaacaagatttttgagccgcaatcactgctcatccttcacagatgcttacggatcaaaaatcttgttccgcggctaaaagtaaagagct

SEQ ID NO: 16984 - RNA, 181 nt, unidentified
  source 1..181: mol_type = other RNA; note = Related to JABAIP010000015.1; note = Shewanella sp.
gctctttagtgttattaggattaactctatgatgtttaatctagtttggtgttgcgccaaactctaatttattgggcagatttacagttgcggaacaacatttttgagccgcaaccgctgctcatccttcgcagacgcttacggatcaaaaatgttgttccgcggctttaagtaaagagca

SEQ ID NO: 16985 - RNA, 181 nt, Vibrio sp.
  source 1..181: mol_type = other RNA; note = Related to CAOA01000025.1; note = Vibrio nigripulchritudo
gctctttagcgtaatttagattagataatgttgatttaatctagtttggcgttgcgccaaactctaacttattgggcagttttacagttgcggaactaaatttttgagccgcaaccgctgctcattcttcacagacgcttacggatcaaaaatttagttccgcggcttctagtaaagagct

SEQ ID NO: 16986 - RNA, 183 nt, unidentified
  source 1..183: mol_type = other RNA; note = Related to NZ_FNXF01000018.1; note = Rheinheimera pacifica
gctctttagtgttttcaggattagtcctgcaaggattgatctagttcggcgttgcgccgaactctaaattattgggcagatttgcggttgcggaacaaaatttttgagcctcaattcgtagttcgtccctcacttcgcctttcggatcaaaaattttgttccgcggctaactagtaaagagcg

SEQ ID NO: 16987 - RNA, 184 nt, unidentified
  source 1..184: mol_type = other RNA; note = Related to NZ_AXWP01000001.1; note = Psychromonas arctica
actctttagcgttttttggattaaattcaaatgctttaatctagtttggcgttgcgccaaactctaacttattgagcatatttatagttgcggaacaaaatttctgaaccgcaatacgttgctcatacttcacatccgcttacggatcagaaatgttgttccgctagcttctaggtaaagagtc

SEQ ID NO: 16988 - RNA, 182 nt, unidentified
  source 1..182: mol_type = other RNA; note = Related to JADYXL010000005.1; note = Pseudoalteromonas sp.
gcactttagcgttattttggttagatattaaatatttaatctagtttggcgatgcgccgaactctaatttattgagtacattcaaagttgcgaaataaaactcctgaactgcaatccgttgttcgtacctcacagccgtttgcagatcaggagtttgattccgcgtctactagtaaagggca

SEQ ID NO: 16989 - RNA, 168 nt, unidentified
  source 1..168: mol_type = other RNA; note = Related to CP015750.1; note = Pectobacterium wasabiae
gctctttagcgtattgtggatttaccatgtttttggtcaaatctagttgggcgttgcgccgaactctaatttattgattacatttacagttgcggaacaaactttttgagccgcaatccagtaggttgcggatcaaaaagtttgttccgcggctacaagtaaagagcc

SEQ ID NO: 16990 - RNA, 168 nt, unidentified
  source 1..168: mol_type = other RNA; note = Related to DAFWTN010000002.1; note = Klebsiella quasipneumoniae
gctctttagcgtattatggatttaccacctgattggtcaaatctagttgggcgttgcgccaaactctaatttattgattacatttacagttgcggaacaaactttttgagccgcaatccagtaggttgcggatcaaaaagtttgttccgcggcttcaagtaaagagcc

SEQ ID NO: 16991 - RNA, 164 nt, unidentified
  source 1..164: mol_type = other RNA; note = Related to UGYN01000002.1; note = Serratia quinivorans
gctctttagcgtagtatgggttttaccattgaaggttaaatctagtttggcgatgcgctgaactctaacttattgattacatttacagttgcggaacaacatttctgagccgcagccgtagttgcggatcagaaatgttgttccgcggcttctagtaaagagca

SEQ ID NO: 16992 - RNA, 171 nt, unidentified
  source 1..171: mol_type = other RNA; note = Related to JAGJEM010000002.1; note = Pseudoalteromonas luteoviolacea
gctctttagcgtaatttggattagttttaatctagtttgatgatgcgtcaaactcaaatttattgagcaatattctgcgctgcggaaagaaattttcgatccgcagttcttgctcatccttcgcaaaactgcggatcaaaaatttccttccgcggcgactagtaaagagca

SEQ ID NO: 16993 - RNA, 179 nt, unidentified
  source 1..179: mol_type = other RNA; note = Related to NZ_NBOE01000008.1; note = Colwellia polaris
gctctttagtgtatttttgattgaatttaatggtttaatctagtttggcgttgcgccaaactcaaatttattgagtacatttacagttgcgaaatcaaattattgatccgtgatatgtactcatacttcgcacagataacggatcaataatttgattccgcgtctttaagtaaagagta

SEQ ID NO: 16994 - RNA, 178 nt, Vibrio parahaemolyticus
  source 1..178: mol_type = other RNA; note = Related to NNIR01000014.1
gctctttagcgtaatttggattaagtttatgatttaatctagtttggcgttgcgccgaactctaatttattgagtggttttgcagctgcggaacggcatttccgaactgcaatagttactcattcttcgcaacgattgcagatcggaaatgccgctccgcgtctttaagtaaagagct

SEQ ID NO: 16995 - RNA, 178 nt, unidentified
  source 1..178: mol_type = other RNA; note = Related to SEZJ01000011.1; note = Aliivibrio finisterrensis
gctctttagcgtaatttggattgaatttatgatttaatctagtctggcgttgcgccaaactctaatttattgagtggttttgcagctgcggaacaatatttccgaactgcaatcgtcactcattcttcgcaacgattgcagatcggaaataccgttccgcgtctttaagtaaagagct

SEQ ID NO: 16996 - RNA, 179 nt, Vibrio sp.
  source 1..179: mol_type = other RNA; note = Related to JAKEVQ010000003.1; note = Vibrio brasiliensis
gctctttagcgtaatttggattaagcttagtgttttaatctagtttggcgttgcgccaaactctaatttattgagtgcttttgcagctgcggaacggcattcccgatctgcaatagttactcattcttcgcaacgattacagatcggaaatgccgatccgcgtctttaagtaaagagct

SEQ ID NO: 16997 - RNA, 178 nt, Vibrio sp.
  source 1..178: mol_type = other RNA; note = Related to PIZL01000016.1
gctctttagcgtaatttggattaatcttacgatttaatctagtttggcgttgcgccaaactctaatttattgagtggttttgcagctgcggaacggtatttccgaactgcaatagttactcattcttcgcaacgattgcagatcggaaataccgctccgcgtcttttagtaaagagct

SEQ ID NO: 16998 - RNA, 179 nt, unidentified
  source 1..179: mol_type = other RNA; note = Related to JAEFCD010000023.1; note = Alteromonas sp.
gctctttagcgtaatttggattagatcttgtaatttaatctagtttggcgttgcgccaaactcaaatttattgagtagttttacggttgcggaacgacattatcgatccgcaatagttgctcattcttcgcaccgattgcggatcgataatgtcgttccgcgtctcaaagtaaagagta

SEQ ID NO: 16999 - RNA, 179 nt, Vibrio sp.
  source 1..179: mol_type = other RNA; note = Related to VTYC01000009.1
gctctttagcgtaatttggattagatttattgatttaatctagtttggcgttgcgccaaactctaacttattgagtaattttacagttgcggaacgacattatcgatccgtgatagttactcattcttcgcaacgatcacggatcgataatgtcgttccgcgtcttaaagtaaagagtc

SEQ ID NO: 17000 - RNA, 179 nt, unidentified
  source 1..179: mol_type = other RNA; note = Related to WMDD01000002.1; note = Photobacterium carnosum
actctttagcgtaatttggattaaatttataggtttaatctagtttggcgttgcgccaaactctaatttattgagtagttttacagttgcggatcgaaattttcgaaccgtaatagttactcattcttcgtaccgattacggatcgaaaatttcgctccgcgtctttaagtaaagagtt

SEQ ID NO: 17001 - RNA, 174 nt, unidentified
  source 1..174: mol_type = other RNA; note = Related to JADZHL010000041.1; note = Shewanella algae
gctctttagcgttatacggattaggtactacttagtctagtttggcgatgcgccaaactctaacttattgagggcattcacagttgcggaacaacatttttgaaccgcagttgtttactccctcgtaaaaactgcggttcaaaaatgttgttccgctgcttctagtaaagagca

SEQ ID NO: 17002 - RNA, 178 nt, unidentified
  source 1..178: mol_type = other RNA; note = Related to PAZB01000040.1; note = Idiomarinaceae bacterium
gctctttagcgtatgttggattagactgttatgggtttgatctagtttggcgatgcgccgaactctaatttattgagcacttttagagttgcggaactaaagtttagaaccgctccttcactcggtgctcgcgcgccacggttctaaactttagttccgcggcttcaagtaaagagca

SEQ ID NO: 17003 - RNA, 152 nt, unidentified
  source 1..152: mol_type = other RNA; note = Related to NZ_CP054160.2; note = Serratia fonticola
gctctttagcgtatggacggtttttgcgtctagtcgggcggttagccagactctaacttattgagcacttttatgattgcgataaacacttcatcgcatcataaagtgttatgatgcgatgaagtgtttatcgcggcttctagtaaagggct

SEQ ID NO: 17004 - RNA, 152 nt, unidentified
  source 1..152: mol_type = other RNA; note = Related to JADTXI010000006.1; note = Serratia ureilytica
gctctttagcgtaaggacgaattatacgtctagtcgggcggttagccagactcaaacttattgagcacttttatgattgcgataaacacttcatcgcatcataaagtgttatgatgcgatgaagtgtttatcgcggcttctggtaaagggcg

SEQ ID NO: 17005 - RNA, 166 nt, unidentified
  source 1..166: mol_type = other RNA; note = Related to CP059036.1; note = Serratia marcescens
gctctttagtgtcggaacaatggttccagccgggtgtttagccaggcgctaatttattgtccatttcaggattgcgaaagacacacacttctccttcgcctatcctgctctgggcagtctatgcgaaggagaagtgcgtgtctttcgctgtctttagtaaagagcg

SEQ ID NO: 17006 - RNA, 166 nt, unidentified
  source 1..166: mol_type = other RNA; note = Related to NZ_JACHAQ010000007.1; note = Pectobacterium brasiliense
gctctttagtgtaggaacaatggttccagccgggtggttagccaggctctaatttattgtccattttagggttgcgaaagacacgcacttctccttcgcatttcctgctttgggcagtctctgcgaaggagaagtgcgtgtctttcgctgtctttagtaaagggca

SEQ ID NO: 17007 - RNA, 166 nt, unidentified
  source 1..166: mol_type = other RNA; note = Related to NZ_LR607333.1; note = Klebsiella aerogenes
gctctttagtgtaggaacaatggttccagccgggtggttagccaggctctaatttattgtccataatagggttgcgaaagacacacacttctccttcgcatatcctgcttatggcagtcaatgcgaaggagaagtgcgtgtctttcgctgtctttagtaaagggca

SEQ ID NO: 17008 - RNA, 137 nt, unidentified
  source 1..137: mol_type = other RNA; note = Related to JACHAS010000001.1; note = Pectobacterium polaris
gctctttagcgtaggaacattggttccagccgggtgattagctaggctctaatttattgtccacatcagggttgcgaaagacacgcacttcgtctnnagacgaagtgcgtgtctttcgctgtctttagtaaagggct

SEQ ID NO: 17009 - RNA, 165 nt, unidentified
  source 1..165: mol_type = other RNA; note = Related to PQJY01000001.1; note = Leclercia sp.
gctctttagcgtaggaacataggttccagccgggtgtttagccaggcttaaatttattgtccagtttagggttgcgaaagacacagagtcctccttcgcatccctggctggtaccagatatgcgaaggaggactctgcgtctttcgctgtctttagtgaagagtc

SEQ ID NO: 17010 - RNA, 164 nt, Escherichia coli
  source 1..164: mol_type = other RNA; note = Related to CP026641.1
gctctttagtgtaggaacattggttccagccgggtgattagccaggcttaaatttattgtccggtttagggttgcgaaagacacagatttctccttcgcatccctgcccggggcagatatgcgaaggagaaatctgtgtctttcgctgtctttagtgaagagtc

SEQ ID NO: 17011 - RNA, 165 nt, Enterobacter sp.
  source 1..165: mol_type = other RNA; note = Related to JAHEUL010000001.1; note = Enterobacter mori
gctctttagtgtaggaacattggttccagccgggcgattagccaggcttaaatttattgtccagtttagggttgcgaaagacacagatttctccttcgcctctctggctggtgccagatatgcgaaggagaaatctgtgtctttcgctgtctttagtgaagagtc

SEQ ID NO: 17012 - RNA, 166 nt, unidentified
  source 1..166: mol_type = other RNA; note = Related to LFJS01000012.1; note = Serratia marcescens
gctctttagcgctatggaccttaattagtggtctagccgggcgtttagccaggctctaacttattgggcacatttggttgcgaaagtaacgcattcgcttcctcgatctccgtgccgtcgttcgtggaagcgaatgcgttactttcgctgtctttagtaaagagct

SEQ ID NO: 17013 - RNA, 160 nt, unidentified
  source 1..160: mol_type = other RNA; note = Related to JACYNT010000005.1; note = Pantoea agglomerans
gctctttagcgaaggacctaagatttggtctagccgggtgtttagccaggctctaatttattgagcacattgaggttgcgaaagtcacgcattcgcttcctcaaacgagtgttcgttctcgaaagcgaatgcgtaactttcgctgtctttagtaaagagc

SEQ ID NO: 17014 - RNA, 171 nt, Escherichia coli
  source 1..171: mol_type = other RNA; note = Related to CP057778.1
gctctttagcgttagggaaccattgcgttctagccgggcgataagccaggctctaatttattgctcagtttagggttgcgaaagcgacgaattccgccttcgcatcctatggctgttgccatagtttacgaaggcggaattcgtcgctttcgctgtctttagtgaagagct

SEQ ID NO: 17015 - RNA, 169 nt, Vibrio sp.
  source 1..169: mol_type = other RNA; note = Related to CP003330.1; note = Vibrio cholerae
gctctttagcgaatggactacacatattagtctagtcgggcgtttagccagactgaaatttattgaacgacactggggttgcgaaatggaggtttttctctcctctcgcatttccctgaactgcgagaggagagaaaaacctccatttcgctgtctctagtaaagagct

SEQ ID NO: 17016 - RNA, 169 nt, Vibrio sp.
  source 1..169: mol_type = other RNA; note = Related to JAHUGH010000003.1; note = Vibrio fluvialis
gctctttagcgtacggactacacaaattagtctagtcgggcgtttagccagactgaaatttattgaacgacactggggttgcgaaatggagatttttctcttctctcgcagttccccaaactgcgagagaagagaaaaatctccatttcgctgtctctagtaaagagct

SEQ ID NO: 17017 - RNA, 179 nt, Vibrio parahaemolyticus
  source 1..179: mol_type = other RNA; note = Related to JACBSQ010000003.1
gctctttagtgcttggactactattattagtctagtcgggcgtttagccagactcaaacttattgaacgacactggggttgcgaaaggtatacaaacatttttcgcagctcttcactcgttcctcataaagatctgcgaaaaatgtttgtacacctttcgctgtctctagtaaagagct

SEQ ID NO: 17018 - RNA, 180 nt, Vibrio sp.
  source 1..180: mol_type = other RNA; note = Related to AAXMKO010000002.1; note = Vibrio alginolyticus
gctctttagtgtttggactatcaaattttagtctagtcgggtgcttagccagactcaaacttattgaacgacactggggttgcgaaagacactcttaagttttccgcatctctctgctcgttcctcacagaaatctgcgaaaaacttaagagtgtctttcgctgtctctagtaaagagct

SEQ ID NO: 17019 - RNA, 178 nt, Vibrio sp.
  source 1..178: mol_type = other RNA; note = Related to MCWW01000053.1; note = Vibrio cyclitrophicus
gctctttagcgtttgggctacctaaaattagtctagtcgggtgtttagccagactcaaatttattgaacgagattggggttgcgaaatgtaccagcaaattttcgcacatccctgctcgttcctcacagaaatttgcgaaaatttgcttgtacatttcgctgtctctagtaaagagct

SEQ ID NO: 17020 - RNA, 141 nt, unidentified
  source 1..141: mol_type = other RNA; note = Related to JACAWH010000114.1; note = Aggregatibacter actinomycetemcomitans
accttttagcgtatgtctacaagttttagttcggtgtttagccgtaacgtatttatattgggcacatatgggttgcgagacaaacgtcaagcaactcaataagttgcttgacgtttgtctcgcttccattagtaaaaggtc

SEQ ID NO: 17021 - RNA, 140 nt, unidentified
  source 1..140: mol_type = other RNA; note = Related to NZ_QEPT01000001.1; note = Haemophilus parainfluenzae
gccttttagtgtatgtctacaagtttagttcggtgtttagccgtaacatgtttatattgggcagatatgggttgcgagacaaatgtcaagcaactcaactagttgcttgacatttgtctcgcttccattagtaaaaggcc

SEQ ID NO: 17022 - RNA, 150 nt, unidentified
  source 1..150: mol_type = other RNA; note = Related to CP069510.1; note = Haemophilus parahaemolyticus
gccttttagcgtatgtctatgaaagcttagctttagttcggtgtttagccgcaacgtatttatattgggcagataagggttgcgagacaaatgtcaagcaactctgaataagttgcttgacatttgtctcgcttccattagtaaaaggtt

SEQ ID NO: 17023 - RNA, 149 nt, unidentified
  source 1..149: mol_type = other RNA; note = Related to NZ_CP060440.1; note = Serratia marcescens
gctctttagcttaggaccaaatcaacggtctagccgggtgtttagccaggctctaatttattgaacgacataaggttgcgaaaggtgcagagcccggccttcgtaccttgtccgggagctgcacctttcgcttcctttagtaaagagtc

SEQ ID NO: 17024 - RNA, 155 nt, Aeromonas sp.
  source 1..155: mol_type = other RNA; note = Related to JAEHHT010000028.1; note = Aeromonas veronii
gctctttagtgtgcagactaacgtgattagtctagtcgggtgtttagccagactctaacttattgaacggatctgaggttgcgaaagcatcgcattcctagatccgcttcgcttgtctaggaatgcgatgctttcgcggcctctagtaaagagca

SEQ ID NO: 17025 - RNA, 167 nt, Vibrio parahaemolyticus
  source 1..167: mol_type = other RNA; note = Related to NNJO01000006.1
gccctttagcgttcggactttatgtcttgtcgggcgataagccagacactaacttattggggaacaattgcggttgcggtgaaaaatcttttctcgcgttctgcaggctcgttcctcaccagcaggtcgcgagaaaagattttccaccgcttcctttagtaaaggga

SEQ ID NO: 17026 - RNA, 165 nt, Vibrio sp.
  source 1..165: mol_type = other RNA; note = Related to PIFK01000090.1; note = Vibrio splendidus
accctttagcgtatggactctatgtcttgtcgggtgctaagccagacactaacttattggggaacaactgcggttgcggtgaaaaatatttcccgcgctctgcctgctcgttcctctcagccaggtcgcgggaaatattttccaccgcttcctttagtaaaggga

SEQ ID NO: 17027 - RNA, 163 nt, unidentified
  source 1..163: mol_type = other RNA; note = Related to NZ_LT897828.1; note = Salinivibrio costicola
accttttagcgtatggacttgatgtcttgtcgggcggttagccagacactaacttattggggagcaattggggttgcggtgaaaaatgtttccgcgacctgtagttcgttcctcactagcaggtcgcggaaacattttccaccgcttccttcagtaaaaggag

SEQ ID NO: 17028 - RNA, 183 nt, Proteus sp.
  source 1..183: mol_type = other RNA; note = Related to NZ_NBUT01000010.1; note = Proteus vulgaris
gttctttagtgttaagacattctctgattaatcaggattagtctagtcgggcgttacgccagactctaatttattgggaaacaattgttgttgcggtgaataaattttaaatccgcaacccaactgtgccacagttagtttgcggatttaaaatttattcaccgctttctttagtaaagaact

SEQ ID NO: 17029 - RNA, 168 nt, unidentified
  source 1..168: mol_type = other RNA; note = Related to NZ_CP011025.1; note = Pseudoalteromonas arctica
atcctttagcgttaagacattatgtctagtcgggcggtacgccagactcaaatttattggggaacatttttggttgcggagaagaacttttctcttcgtatcaattcttcgttcctcagcctagctacgaagagaaaagttcttctccgcttcctttagtaaagggtt

SEQ ID NO: 17030 - RNA, 175 nt, unidentified
  source 1..175: mol_type = other RNA; note = Related to NZ_CP080635.1; note = Shewanella putrefaciens
aacctttagtgtatggactatttagtctagtcgggcgctaagccagactctaacttattgggacacatttttggttgcgggaagggaaatatccatttccaccgccaatcgttcgtccctcacgctcggcagcggaaatggatatttctcttcccgcttcctttagtaaaggtgt

SEQ ID NO: 17031 - RNA, 163 nt, unidentified
  source 1..163: mol_type = other RNA; note = Related to NZ_PYMJ01000011.1; note = Photobacterium frigidiphilum
atcctttagtttatagacattaagtctagtcgggcgataagccagactctaatttattggggagttctgcgattgcggtgtaaattttatccgcgttcgctcaacgagttcctcgtttctcggtcgcggataaaatctacaccgcttccttaagtgaaggatt

SEQ ID NO: 17032 - RNA, 163 nt, Vibrio sp.
  source 1..163: mol_type = other RNA; note = Related to MCYX01000113.1; note = Vibrio splendidus
atcctttagtgtttagacattcagtctagtcgggcgataagccagactctaatttattggggagttctgcgattgcggtgtaaattttatccgcgttcgctcaacgagttcctcgtttctcggtcgcggataaaatctacaccgctgccttaagtaaaggatt

SEQ ID NO: 17033 - RNA, 160 nt, unidentified
  source 1..160: mol_type = other RNA; note = Related to ABIC01000002.1; note = Shewanella benthica
accctttagcgtttagacatttttgtctagtcgggcgataagccagactcaaatttattgggaagttctgcggttgcactaataaaattacgcaaccgctcaacgagtccctcgtttcacggttgcgtaattttattagcgcttcctttagtaatgggca

SEQ ID NO: 17034 - RNA, 156 nt, unidentified
  source 1..156: mol_type = other RNA; note = Related to NZ_WHZZ01000005.1; note = Photorhabdus khanii
gccctttagcgtgaagactatgtagtctagtcgggcgataagccagactctaaattattggaaggttatggggttgcggtaggaaaacgccgcaaccgctcacctgttctgttcccggttgcggcgttttcctaccgcatcctttagtaaagggtt

SEQ ID NO: 17035 - RNA, 85 nt, unidentified
  source 1..85: mol_type = other RNA; note = Related to NHOK01000005.1; note = Yersinia frederiksenii
attggggttgcggtaggaattctccgcaaccgctcacttgttcgcggttgcggagaattcctaccgcatcctttagtaaaaggca

SEQ ID NO: 17036 - RNA, 160 nt, unidentified
  source 1..160: mol_type = other RNA; note = Related to NZ_WMDE01000055.1; note = Photobacterium carnosum
cccctttagcgtatagacttttgtctagtcgggcgttacgccagactcaaatttattggggaacaattccggttgcggtgaaaaatttcccgcgggccggagttcgtacctcacatccggatcgcgggaaattttccaccgcttcctttagtaaagggga

SEQ ID NO: 17037 - RNA, 160 nt, Vibrio sp.
  source 1..160: mol_type = other RNA; note = Related to JAKEUP010000008.1
accctttagcgttaattggactagttttattggtctagtcgggcgatacgccagactcaaatttattggggaacaattttggttgcggttgaaaattttctggcccgactcgttcctcgtccggaagtaaattttaaaccgcttcctctagtaaagggat

SEQ ID NO: 17038 - RNA, 159 nt, Vibrio parahaemolyticus
  source 1..159: mol_type = other RNA; note = Related to AAZQRX010000007.1
accctttagcgcaggacatcatcgtctagtcgggtgttaagccagactcaaacttattggggactttgctggttgcggtgaaaaatttttcccgcgggcctgctcgttcctcgccggatagcgggaaaaattttccaccgcttcctttagtaaagggtt

SEQ ID NO: 17039 - RNA, 162 nt, Vibrio sp.
  source 1..162: mol_type = other RNA; note = Related to NZ_JAFNJW010000049.1; note = Vibrio crassostreae
accctttagtgttagacaaatttgtctagtcgggcgttacgccagactcaaacttattggagaataattccggttgcggtagaaaatttttccgcgagccggactcgttcctcctcctagaacgcggaaaagatttcctaccgcttcctttagtaaagggga

SEQ ID NO: 17040 - RNA, 152 nt, unidentified
  source 1..152: mol_type = other RNA; note = Related to JABCPW010000001.1; note = Serratia marcescens
gtcctttagcgttcagacgtttacgtctagtcgggcgattagccagactctaacttattgtaaagtttcgtggttgcggtattcgttctccgcagccgctcgaaaccttcgcggctgcggagaacgaataccgcatccttaagtaaagggct

SEQ ID NO: 17041 - RNA, 152 nt, unidentified
  source 1..152: mol_type = other RNA; note = Related to PEHA01000001.1; note = Serratia marcescens
gtcctttagcgttcagacgattgcgtctagtcgggtgattagccagactctaacttattgttaagtttcgtggttgcggtagttgttctccgcagccgcttgtaaacttcgcggctgcggagaacaactaccgcatccttaagtaaagggca

SEQ ID NO: 17042 - RNA, 152 nt, unidentified
  source 1..152: mol_type = other RNA; note = Related to AP021969.1; note = Raoultella ornithinolytica
gtcctttagcgttcagacggttacgtctagtcgggcgattagccagactctaacttattgttgggttccgtggttgcggtagtcgttctccgcagccgctcgaaaccatcgcggctgcggagaacgactaccgcatcctttagtaaagggca

SEQ ID NO: 17043 - RNA, 152 nt, unidentified
  source 1..152: mol_type = other RNA; note = Related to CP019077.1; note = Klebsiella pneumoniae
gtcctttagcgtttagacgattacgtctagtcgggtgattagccagactctaacttattgtggggtttcgtggttgcggtagtcgttctccgcagccgcttgaacccatcgcggctgcggagaacgactaccgcatcctttagtaaaggaca

SEQ ID NO: 17044 - RNA, 151 nt, unidentified
  source 1..151: mol_type = other RNA; note = Related to CP023009.1; note = Lonsdalea britannica
gccctttagcgttcagacggttacgtctagtcgggcgttaagccagactctaacttattgtggggtttcgtggttgcggtagtcgttcttcgcatccactcccctagtcgtggatgcgaagaacgactaccgcatcctttagtaaagggtt

SEQ ID NO: 17045 - RNA, 152 nt, Proteus sp.
  source 1..152: mol_type = other RNA; note = Related to NZ_CP029133.1; note = Proteus mirabilis
gtcctttagcgtttagacgattacgtctagtcgggtgattagccagactctaacttattgtgaggattcgtggttgcggtagtagttccctgcaaccgctcgaaatcttcacggcggcagggaactactaccgcatcctttagtaaaggacc

SEQ ID NO: 17046 - RNA, 153 nt, Enterobacter sp.
  source 1..153: mol_type = other RNA; note = Related to NZ_RXRP01000001.1; note = Enterobacter asburiae
gtcctttagcgttcagacggttacgtctagtcgggcgataagccagactcaaatttattggtcggattcgtggttgcggtagttgttctccgcagccgcgattagccaatcacggctgcggagaacaaccaccgcatcctttagtaaaggaca

SEQ ID NO: 17047 - RNA, 160 nt, unidentified
  source 1..160: mol_type = other RNA; note = Related to NZ_CP051652.1; note = Pectobacterium carotovorum
gtcctttagcgtatagacggtcatcgtcttgtcgggcgttcagccagacactaagttattggaaggtttatgaggttgcggtaggtataatcctccgccgctccatgccttgcatctcacggcggaggattatacctaccgcatccttaagtgaaggacg

SEQ ID NO: 17048 - RNA, 160 nt, unidentified
  source 1..160: mol_type = other RNA; note = Related to NZ_LR134116.1; note = Yersinia intermedia
gtcctttagcgtataggcgatcatcgtcttgtcgggcgtttagccagacactaagttattggaaggtttatgaggttgcggtaggtataatcctccgccgctccatgccttgcatctcgcggcggaggattatacccaccgcatccttaagtaaagggca

SEQ ID NO: 17049 - RNA, 160 nt, Salmonella sp.
  source 1..160: mol_type = other RNA; note = Related to AAXBOI010000003.1; note = Salmonella enterica
gtcctttagcgtatagacgaacatcgtcttgtcgggcgcttagccagacactaagttattggaaggtttatgaggttgcggtaggaataatcctccgccgctccatgccttgcatctcgcggcggaggattatccccaccgcatccttaagtaaagggca

SEQ ID NO: 17050 - RNA, 160 nt, Enterobacter sp.
  source 1..160: mol_type = other RNA; note = Related to NZ_LRCR01000003.1
gtcctttagcgtttagacgttttgcgtcttgtcgggtgattagccagacacaaagttattggaaggtttatgaggttgcggtaggtataatcctccgccgctcatggccttgcatttcgcggcggaggattatacccaccgcatccttaagtaaaggaca

SEQ ID NO: 17051 - RNA, 161 nt, Proteus sp.
  source 1..161: mol_type = other RNA; note = Related to JADSTR010000010.1; note = Proteus mirabilis
gtcctttagcgtgtagacgcttttcgtctagtcgggtgcttagccagacactaatttattgagtagtttttggggttgcggtaggtgtagttcaccgccgctccatcgctacgcatttcgcggcggtgaactacacctaccgcatccttaagtaaaggaca

SEQ ID NO: 17052 - RNA, 167 nt, unidentified
  source 1..167: mol_type = other RNA; note = Related to JAGVVN010000001.1; note = Methylovulum psychrotolerans
tctctttagagttttagaactaatcgcatattagtttagtcgggtgtttagccagactctaatttattgagtcgttttaggggcgcggaagctatttttcgcgcttctttcacttcttcgttcaaaaagcgcgaaaaatagcttccgctttatcaaggtaaagagat

SEQ ID NO: 17053 - RNA, 172 nt, unidentified
  source 1..172: mol_type = other RNA; note = Related to JAATWI010000006.1; note = Methylococcaceae bacterium WWC4
tctctttagcgttttagaactaatcaagtattagtttagtcgggtgtttagccagactctaacttattgagtcgttttaggggcgcggaagctatttttcgcgcttttcgtactcattctattcctccaaaaagcgcgaaaaatagcttccgctttatcaaggtaaagagat

SEQ ID NO: 17054 - RNA, 167 nt, unidentified
  source 1..167: mol_type = other RNA; note = Related to WTAZ01000264.1; note = Methylococcaceae bacterium
actctttagtgttttggattaataattttttgatctagtcgggcgtttagccagactcaaatttattgagtggttttaggttgcgaaatacattttctgcgcttcttaaactcattcttcatttcagaagcgcagaaaacatattccgcttcctttagtaaagagtt

SEQ ID NO: 17055 - RNA, 153 nt, unidentified
  source 1..153: mol_type = other RNA; note = Related to JACJDY010000010.1; note = Pseudoalteromonas sp.
actctttagcgtttttgagctgcttttcagcttagtcgggcgatacgccagactgtaatttattgaacggtattatgaatgcgaaagcctcgcatttattatctcgttcctcaataagaaatgcgagaccttcgctttcttaagtaaagagtc

SEQ ID NO: 17056 - RNA, 155 nt, unidentified
  source 1..155: mol_type = other RNA; note = Related to JAHKQX010000026.1; note = Shewanella sp.
actctttagcgttttagagctaatttttttggcttagtcgggcgatacgccagactgtaatttattgaacgacattatgaatgcgaaggtctcgcatttcatatttcgttcctcaataagaaatgcgagaccttcgctttctttagtaaagagta

SEQ ID NO: 17057 - RNA, 182 nt, unidentified
  source 1..182: mol_type = other RNA; note = Related to RCHN01000034.1; note = Ketobacter sp.
gccctttagcgttttagactaccaagaatctagtctagtcgggcgtttagccagactcaaaattattgcgtggcattgctgttgcggaagatgattttatattttccccactcctttcgctttgcagctccagtcgcggagaaaatataaaatcatcttccgcggcatcttagtaaagggca

SEQ ID NO: 17058 - RNA, 176 nt, unidentified
  source 1..176: mol_type = other RNA; note = Related to NZ_SLZR01000017.1; note = Reinekea marinisedimentorum
actctttagtgttattggacctacagtactttcggtctagtcgggcgtttagccagactcaaacttattgattaagattatgattgcggggttaaggctttgccctgattccctctctcattcttcgctcgggaatcagggcaaagccttaaccccgcggcctctagtaaagggtt

SEQ ID NO: 17059 - RNA, 171 nt, unidentified
  source 1..171: mol_type = other RNA; note = Related to NZ_CAJCKX010000049.1; note = Serratia sp.
gctctttagcgttggacatttttgtctagtcgggcgtttagccagactctaacttattgaacaggtttatgattgcgatacagaaaacatcgcatcataaactcacctcccttggcggtcggttcatttatgatgcgatgttttctgtatcgcagcttctagtaaagggca

SEQ ID NO: 17060 - RNA, 170 nt, unidentified
  source 1..170: mol_type = other RNA; note = Related to AP022371.1; note = Providencia rettgeri
gctctttagcgttagacatttttgtctagtcgggcgcttagccagactctaacttattgaacaggtttatgattgcgatacagaattcatcgcgtcataaacagacctccgatgacgtcggttcatttatgacgcgatgaattctgtatcgcggcttctagtaaagagta

SEQ ID NO: 17061 - RNA, 148 nt, Citrobacter sp.
  source 1..148: mol_type = other RNA; note = Related to CP058318.1; note = Citrobacter freundii
gcactttagcgttagacgattctgtctagtcgggcgttaagccagactctaacttattgaacaggtttatgattgcgatacataaaacatcgcgccataaactgacatgacgcgatgttttatgtatcgctacttttagtaaagggca

SEQ ID NO: 17062 - RNA, 185 nt, unidentified
  source 1..185: mol_type = other RNA; note = Related to JABSOI010000029.1; note = Alteromonadaceae bacterium
gctctttagcgtttggacttattttgttgtctaaaacacaatattagtctagtcgggcgttttgccagactcaaacttattgaacgattttatggtgcgaaacctttttatagatcaggttcgtacctcgttcctcgctacaaacctgatctataaaaaggtttcgcttcctttagtaaagagtt

SEQ ID NO: 17063 - RNA, 171 nt, unidentified
  source 1..171: mol_type = other RNA; note = Related to NZ_CP014322.1; note = Alteromonas stellipolaris
gctctttagtgttttcggacgaaatacgtctagtcgggtgtttagccagactcaaatttattgagccctctggggttgcgaattactcctgccctcggaggagttctaaagtgcgcaagcgcacccactcctccgagggcaggagtaattcgctgcgtctagtaaagagca

SEQ ID NO: 17064 - RNA, 146 nt, Aeromonas sp.
  source 1..146: mol_type = other RNA; note = Related to NZ_CDBH01000035.1; note = Aeromonas dhakensis
gctctttagtgttggacacattgtctagtcgggtgattagccagactctaatttattgagcagattaggttgcgaaagactcgcattcctatttccgcttcgctgcactaggaatgcgagtctttcgcttcctttagtaaagagcc

SEQ ID NO: 17065 - RNA, 160 nt, Aeromonas hydrophila
  source 1..160: mol_type = other RNA; note = Related to NZ_CP027804.1
gctctttagcgtatggacgatttcgtctagtcgggtgtttagccagactcaaatttattgaacagatttatggttgcgaaagcatcgcatacctagatccgttccgcttcgcttcactgttctaggtatgcgatgctttcgcttcctttagtaaagagca

SEQ ID NO: 17066 - RNA, 151 nt, unidentified
  source 1..151: mol_type = other RNA; note = Related to QEKR01000001.1; note = Pectobacterium versatile
gctctttagcttatggctcagtataaaagccttgtcgggcgcttcgccagacaccaacttattgaacgacaatgtggttgcgaaagtctcgcgccccaagctcgttaactcacttaggtcgcgagactttcgcttcctctagtaaagagtg

SEQ ID NO: 17067 - RNA, 152 nt, unidentified
  source 1..152: mol_type = other RNA; note = Related to JAENMV010000007.1; note = Lelliottia amnigena
gctctttagcttatggctctgtattaaaagccttgtcgggcgtttcgccagacaccaacttattgaacgacattgtggttgcgaaagtctcgcgacccaagctcgtcaactcacttaggtcgcgagactttcgcttcctctagtaaagagtg

SEQ ID NO: 17068 - RNA, 151 nt, unidentified
  source 1..151: mol_type = other RNA; note = Related to CP002824.1; note = Klebsiella aerogenes
gctctttagcttgtggctcagtattaaagccttgtcgggcgcttcgccagacaccaacttattgaacgacattgtggttgcgaaagtctcgcgacccaagttcgttaactcacttaggtcgcgagactttcgcttcctctagtaaagagcg

SEQ ID NO: 17069 - RNA, 149 nt, unidentified
  source 1..149: mol_type = other RNA; note = Related to JAADJV010000002.1; note = Rahnella aceris
accctttagctcaggctcaattcatcgggctagtcgggcgtttagccagactcaaacttattgaacgtcattttggttgcgaaagtctcgcaaccagagctcgttcctcactctggttgcgagactttcgcttccttcagtaaagggtg

SEQ ID NO: 17070 - RNA, 149 nt, unidentified
  source 1..149: mol_type = other RNA; note = Related to NZ_CP050508.1; note = Raoultella terrigena
actctttagcttaggctcaattcatcgggctagtcgggcgtttagccagactcaaacttattgaacgtcattttggttgcgaaagtctcgcaaccagagctcgttcctcactcaggttgcgagactttcgcttccttcagtaaagagta

SEQ ID NO: 17071 - RNA, 94 nt, Vibrio sp.
  source 1..94: mol_type = other RNA; note = Related to MCYT01000164.1
ctttagcttaaggctacagtaattttagcctagtcgggcgattagccagactcaaacatattgaacgagattttgggtgcgaaagcacataaag

SEQ ID NO: 17072 - RNA, 169 nt, Vibrio sp.
  source 1..169: mol_type = other RNA; note = Related to CP030798.1; note = Vibrio owensii
gctctttagcttatggctacaattatttagcctagtcgggcgattagccagactcaaacttattgaacgagaatttgggtgcgaaagcacataaagcatcgcgccctgacctcgttcctcgttcagggcgcgatgctttatgtactttcgcttcctttagtaaagagta

SEQ ID NO: 17073 - RNA, 151 nt, unidentified
  source 1..151: mol_type = other RNA; note = Related to NZ_UGHC01000001.1; note = Grimontia hollisae
gctctttagctttaggcttaccagtcttagcctagtcgggcgattagccagactcaaatttattgaacgagattttggttgcgaaagcatcgcaccctaagctcgttcctcacttagggtgcgatgctttcgcttcctccagtaaagagtc

SEQ ID NO: 17074 - RNA, 167 nt, Vibrio sp.
  source 1..167: mol_type = other RNA; note = Related to NZ_AP014635.1; note = Vibrio tritonius
gctctttagcttgtggctcaaattttagcctagtcgggcgattagccagactcaaacttattgaacgggtttttgggtgcgaaagcacataaagctttacgccccgctctcgttcctcgtttggggcgtaaagctttatgcactttcgcgtcctctagtaaagagct

SEQ ID NO: 17075 - RNA, 146 nt, Vibrio sp.
  source 1..146: mol_type = other RNA; note = Related to CP036500.1; note = Vibrio cholerae
gctctttagctttgggcttaattttcggcctagtcgggtgattagccagactcaaacttattgaacgagattttggttgcgaaagcatcgcgaccaatactagttcgtattggtcgcgatgctttcgcttcctctagtaaagagca

SEQ ID NO: 17076 - RNA, 152 nt, Vibrio sp.
  source 1..152: mol_type = other RNA; note = Related to NZ_SLWI01000001.1; note = Vibrio crassostreae
actctttagcgtttgggtgaaatttgatttacctagtcgggcgattagccagactgaaatttattgaacgggtttttggttgcgaaagcatcacatcctaaactcgttcctcatttaggatgtgatgctttcgcttcctctagtaaagggta

SEQ ID NO: 17077 - RNA, 153 nt, unidentified
  source 1..153: mol_type = other RNA; note = Related to JAJVEH010000001.1; note = Aliivibrio fischeri
actctttagcgttcgggttaaatattaatttacctagtcgggcgattagccagactgaaacttattgaacgggtttttgggtgcgaaagcatcacatcctaaattcgttcctcatttaggatgtgatgctttcgcttcctctagtaaagggtt

SEQ ID NO: 17078 - RNA, 190 nt, unidentified
  source 1..190: mol_type = other RNA; note = Related to NZ_JWGX01000025.1; note = Shewanella sp.
gctctttagcgttttgggcttttaaggtgttcaatgatcaatctaatcagcctagtcgggtgtatagccagactgaaacttattgaacgggatttaggttgcgaaagcaagaaattgctacgttgcctaaatcttagtcgatttaggcaacgtagcaatttcttgctttcgcttcctccagtaaagagca

SEQ ID NO: 17079 - RNA, 168 nt, Enterobacter sp.
  source 1..168: mol_type = other RNA; note = Related to NZ_CP041062.1; note = Enterobacter ludwigii
gctctaaacgtgtatggcatatttagttatgcttgtcgggcgcttagccagacactttcatattgaacggctttagggttgcgcttggtgtgcctctggattgcactcctagtttcacgtcgtcgcgcaatccagaggaacaccaagcgcttcctctaggtaagagct

SEQ ID NO: 17080 - RNA, 168 nt, unidentified
  source 1..168: mol_type = other RNA; note = Related to NZ_CP031104.1; note = Leclercia sp.
gctctaaacgtgtgtggcatatttagttatgcttgtcgggcgcttagccagacactttcatattgaacggcattagggttgcgcttggtgtgcctctggattgcactcctagctgcacgtcgtcgcgcaatccagaggaacaccaagcgcttcctctaggtaagagct

SEQ ID NO: 17081 - RNA, 168 nt, unidentified
  source 1..168: mol_type = other RNA; note = Related to NZ_JAIVKM010000013.1; note = Mangrovibacter yixingensis
gctctaaacgtgtatggcatatttagttatgcttgtcgggcgcttagccagacacttttatattgaacggctttagggttgcgcttggtgtgcctctggattgcactcctagttgcacgtcgtcgcgcaatccagaggaacaccaagcgcttcctctaggtaagagca

SEQ ID NO: 17082 - RNA, 166 nt, unidentified
  source 1..166: mol_type = other RNA; note = Related to NZ_JAAQVP010000001.1; note = Providencia rettgeri
gctctaacgtgtatggcatattcagatatgctggtcgggcgtttagccagacactttaatattgaacggctttagggttgcgcttggtgtgcctctggattgcactcctcgcaagcatcctcgcgcaatccagaggaacaccaagcgcttcctctaggtaagagca

SEQ ID NO: 17083 - RNA, 157 nt, unidentified
  source 1..157: mol_type = other RNA; note = Related to JAKUDL010000001.1; note = Shewanella sp.
actctttagcttctggacttctaaagtctagtcgggcgattagccagactgttaactattgagcacacttaggccgcgttataaagaattacgccgatcctgagcttgtgctcaagatcggcgtaattctttataacgcttcctttagtaaagagta

SEQ ID NO: 17084 - RNA, 154 nt, unidentified
  source 1..154: mol_type = other RNA; note = Related to WBJR01000006.1; note = Hydrogenovibrio sp.
gctctttagcgttgtagcttacttaattttgctatgtctgtcgattcgacggaccctaacttattgagtgtttttggtgggcgaaagaattaatttctttcgtgcctaaagtcactcaagaaattaatttttcgccccattagtgtaaagagcc

SEQ ID NO: 17085 - RNA, 158 nt, unidentified
  source 1..158: mol_type = other RNA; note = Related to NZ_UGYV01000001.1; note = Shewanella morhuae
tctctttagcgtttcgggctttaattttgcctagtcgggcgtttcgccagacactaacttattgaggtcacttgggagcaccagcaaactttctgctgagcctttcgtacctcaaggatcaccagaaagtttgctggtgcctcctttagtaaagagag

SEQ ID NO: 17086 - RNA, 162 nt, unidentified
  source 1..162: mol_type = other RNA; note = Related to PJAR01000040.1; note = Glaciecola sp.
tctctttagcgtttagagtcggtttacgacttagtcgggcgattagccagacacaaatttattgagtatattggatgcgttaggaaactttctttcggttcctgctcgcaagctcactaggatccgaaataaagtttcctaacgcctactaagtaaagagat

SEQ ID NO: 17087 - RNA, 162 nt, unidentified
  source 1..162: mol_type = other RNA; note = Related to NZ_BMLS01000007.1; note = Bowmanella pacifica
actctttagcgtttaggctgttgaaattttaagccttgtccggcgattcgccagacacaaacttattgagcacatctgggctgcgttagatatttatctaccgatccttcgtgcctcaggagcggtagataaatatctaacgcttcctctgagtaaagagtt

SEQ ID NO: 17088 - RNA, 161 nt, unidentified
  source 1..161: mol_type = other RNA; note = Related to BMOT01000001.1; note = Shewanella aestuarii
actctttagcgtttaggctgtttaaattcacggcttgtccggcgattcgctagacacaaatttattgagcacatttgggctgcgttagatatttatctaccgatccttcgtgcctcaggagcgatagataaatatctaacgcttcctttgagtaaagagtg

SEQ ID NO: 17089 - RNA, 159 nt, unidentified
  source 1..159: mol_type = other RNA; note = Related to JADYXE010000008.1; note = Pseudoalteromonas sp.
actctttagcgtttaggcgaatattatctgccttgtctggcgtttcgctagacacaaatttattgagcacatttgggctgcgttagatatttatctaccgatccttcgtgcctcaggagcgatagataaatatctaccgcttcctctgagtaaagagtt

SEQ ID NO: 17090 - RNA, 162 nt, unidentified
  source 1..162: mol_type = other RNA; note = Related to PGZF01000002.1; note = Gammaproteobacteria bacterium HGW-Gammaproteobacteria-15
actctttagcgtttaggctgttgtaaattactgccttgtccggcgtttcgctagacactaaattattgagcacatttgggctgcgttagatatttatctaccgatccttcgtgcctcacgagcggtagataaatatctaacgcttcctctgagtaaagagtt

SEQ ID NO: 17091 - RNA, 159 nt, unidentified
  source 1..159: mol_type = other RNA; note = Related to NZ_CP027426.1; note = Klebsiella oxytoca
actctttagcgttaggctttgatttatagccttgtcgagcgtttcgccagacactaacttattgagtacttttagggttgcgctagaaagttttctaccgatcctagaagtctctaggatcggtagaaaactttctagcgcctcctctagtaaagagta

SEQ ID NO: 17092 - RNA, 164 nt, unidentified
  source 1..164: mol_type = other RNA; note = Related to NZ_WUBS01000016.1; note = Acerihabitans arboris
actctttagcgttacgggccttttttagccttgtcgggcgattcgccagacactaacttattgagcacatttagggttgcgctagatacgaatctaccgatcctagattgctgcgcatcaaggatcggtagattcgtatctagcgcctcctttagtaaagagtg

SEQ ID NO: 17093 - RNA, 167 nt, unidentified
  source 1..167: mol_type = other RNA; note = Related to NZ_LUUH01000065.1; note = Methylomonas methanica
gctctttagcgttttgactatgttctctattaatagtcttgtctggcgattcgccagacactaacttattgttgacatttaggttgcgttagaaaattttctaccgctcctccgtgtcctccggatcgctagaaaattttctaacgcccccttaaatgtaaagagta

SEQ ID NO: 17094 - RNA, 163 nt, unidentified
  source 1..163: mol_type = other RNA; note = Related to MAJP01000040.1; note = Aliivibrio fischeri
gctctttagcgtttgggctaaataaatatttacgccttgtctggcgtttcgctagacactaacttattgggtacatttaggttgcgttagaaaattttctaccgatccttcgtacctcaggagcgatagaaaaccttctaacgctggcctctagtaaagagtt

SEQ ID NO: 17095 - RNA, 133 nt, unidentified
  source 1..133: mol_type = other RNA; note = Related to LZOY01000008.1; note = Haemophilus haemolyticus
actctttagcgtataagcaatttgctttgtcaggcgtttcgctagaccctaacttattgattagatttaggttgcgttagaaaaatttctgacnngtcagaaatttttctaacgcggccttaagtaaagagta

SEQ ID NO: 17096 - RNA, 143 nt, Pasteurella sp.
  source 1..143: mol_type = other RNA; note = Related to NZ_CP028926.1; note = Pasteurella multocida
actctttagtgtttaagcatttgctagtcgggcgtttcgctagactctaacttattgagaggatttggctgcgttagaatattttcagccgatccttgcaggagcagctgaaaatattctaacgcttccttaagtaaagagta

SEQ ID NO: 17097 - RNA, 145 nt, unidentified
  source 1..145: mol_type = other RNA; note = Related to NZ_CP063116.1; note = Haemophilus parainfluenzae
actctttagcgtataagcaatttgcttagtcgggcgtttcgctagacacaaacttattgattagatttaggttgcgttagaaaatttctgacgatcctaaatcggagcgtcagaaattttctaacgcggcctttagtaaagagat

SEQ ID NO: 17098 - RNA, 150 nt, unidentified
  source 1..150: mol_type = other RNA; note = Related to NZ_SLYB01000005.1; note = Cricetibacter osteomyelitidis
actctttagcgtttgtaagcaaattgctcagtcaggtgtttagctagactcaaatttattgattagatttaggatgcgttagaaaattttctatcgatcctggattcggagcgatagaaaattttctaacgcggcctttagtaaagagta

SEQ ID NO: 17099 - RNA, 161 nt, Aeromonas sp.
  source 1..161: mol_type = other RNA; note = Related to NZ_AP022188.1; note = Aeromonas media
actctttagcgtttgggctttgttttaaatagccttgtcaggcgattcgccagacactaatttattgagcacatttagggttgcgaaagatgcttttcttccgatccttcgtgcctcacgagcggaagaaaagcatctttcgcctcctttagtaaagagtt

SEQ ID NO: 17100 - RNA, 160 nt, Aeromonas sp.
  source 1..160: mol_type = other RNA; note = Related to NZ_AP022264.1; note = Aeromonas veronii
actctttagcgttttggcttcgttatacaagccttgtcgggcggttcgctagacacaaatttattgagcacatttagggttgcgaaagatgcatttcttccgatccttcgtgcctcacgagcggaagaaatgcatctttcgcctcctttagtaaagagtt

SEQ ID NO: 17101 - RNA, 159 nt, Aeromonas sp.
  source 1..159: mol_type = other RNA; note = Related to NZ_JMGO02000012.1; note = Aeromonas enteropelogenes
actctttagcgtatgggctttcatttttagcctagtcgggcgattcgctagactcaaatttattgagcacatttagggttgcgaaagatgtatgtcttccgatccttcgtgcctcacgatcggaagacatacatctttcgcttcctttagtaaagagtt

SEQ ID NO: 17102 - RNA, 177 nt, unidentified
  source 1..177: mol_type = other RNA; note = Related to NZ_PEAX01000003.1; note = Alteromonas flava
actctttagcgttttggacttgttgacttccaaaagtgtcaatatacgtcttgtctggcgtttcgccagacactaatttattgggtacatttagggttgcgaaagatacttttctcacgatccttcgtccctcacgagcgtgagaaaactatctttcgcttccgacagtaaagagtg

SEQ ID NO: 17103 - RNA, 159 nt, unidentified
  source 1..159: mol_type = other RNA; note = Related to DQNK01000125.1; note = Gammaproteobacteria bacterium
actctttagcgtacaggcttgcggttatagcctagtctggcgtttcgccggacacaaatttattgagcacatttagggttgcgaaagatgtatttcttccgatccctcgtgcctcgcgagcggaagaaatacatctttcgcttcctctagtaaagagtg

SEQ ID NO: 17104 - RNA, 168 nt, unidentified
  source 1..168: mol_type = other RNA; note = Related to JAEINI020000025.1; note = Alishewanella sp.
ccttttacgcgtttaggcaatatagtcttaatttgacaaagcctcgtccggcgtttcgctcgacttacgtttattgaacacttttagggttgcgctaaagcacttctgtcaagatccactgaagtggaacatgccagaagtcttcagcgcagcctctaggtaaaagga

SEQ ID NO: 17105 - RNA, 173 nt, Acinetobacter sp.
  source 1..173: mol_type = other RNA; note = Related to NZ_CP055277.1
tctctttagtttttttataaattcgactatctttctttgatagaaaattttataaaagtttagcgtttcgctaaactaacgttattgtgagaaatttaggataccattagatgaatttcttcgtacctaaagttacttagaaattaatctaacgctatcctgagtaaagagat

SEQ ID NO: 17106 - RNA, 165 nt, Acinetobacter sp.
  source 1..165: mol_type = other RNA; note = Related to MVON01000005.1
tctctttagcctttttataaaacgaactattttgggtagttttataaaagtttagcgtttcgctaaactaatgttattgtgagaaatttaggcttgcgttagatgaatttctgcgcacctaaaggagcttagaaattcatctaacgctatcctgagtaaagagat

SEQ ID NO: 17107 - RNA, 170 nt, Acinetobacter sp.
  source 1..170: mol_type = other RNA; note = Related to JADWNN010000006.1; note = Acinetobacter bereziniae
tctctttagccttttttataaaactaactatccttatggataagttttgtaaaagtttagcgattcgctaaattaatgttattgtgagaaatttaggtttgcgttagatgaatttctgcgcgcctaaaggagcttagaaattcatctaacgctatcctgtgtaaagagat

SEQ ID NO: 17108 - RNA, 174 nt, Acinetobacter sp.
  source 1..174: mol_type = other RNA; note = Related to DADAZD010000003.1; note = Acinetobacter baumannii
atcctttagcgttatttaagttgactaatacgttagtaacttaaatagtttggcgtttcgccaaacttaatttgattgtgaccatttagggttgcgctaatcaaatttttcttcatacggcttagtcgcctgtactcagaaaaattagattaccgcatccctgtgtaaaggatt

SEQ ID NO: 17109 - RNA, 167 nt, Acinetobacter sp.
  source 1..167: mol_type = other RNA; note = Related to NZ_CP061828.1; note = Acinetobacter seifertii
ttcctttagcgtaatttaagttcactaattttttagtaacttaaatagtttggtgtttcgccgaactctatttgattgtgaccatttagggttgcgctaattaaattttcttcatacgtctcgccgtattcagaaaattcaattaccgcatccctgtgtaaagaaat

SEQ ID NO: 17110 - RNA, 155 nt, Acinetobacter sp.
  source 1..155: mol_type = other RNA; note = Related to NEGC01000003.1
actctttagctttatttaggttactaaaacctaaatagttcggcgtttcgccgaactctaatcgattgtcaacttctagggttgcgctaattccctttttcctcatcctaaaggaatcggaaaaatgaaattaccgcatccctgtgtaaagagtt

SEQ ID NO: 17111 - RNA, 179 nt, unidentified
  source 1..179: mol_type = other RNA; note = Related to NZ_JAGKLI010000001.1; note = Providencia rettgeri
acctttacgcgtaggataactcattttatccttgtcgggcgtttcgccagacactaatttattgtggacatttagggttgcgcttcagcacttttagccagatcctgaatgccactcgcaggcttcgtgtccttcaggagctgtctaaaagtctaaagcgcatcctttaggtaaaggta

SEQ ID NO: 17112 - RNA, 178 nt, Proteus sp.
  source 1..178: mol_type = other RNA; note = Related to CP049941.1; note = Proteus mirabilis
acctttacgcgtgggataacttattaatccttgtcgggcgtttcgccagacactaatttattgtgaacatttagggttgcgctttagcacttttagccagatcctgaatttcactgcgcaggcttgttccattcaggagccgtctaaaagtctaaagcgcatcctttaggtaaaggac

SEQ ID NO: 17113 - RNA, 170 nt, Salmonella sp.
  source 1..170: mol_type = other RNA; note = Related to CP074281.1; note = Salmonella enterica
gcctttacgcgtgggataactggtttatccttgtcgggcgtttcgccagacactaatttattgtggacatttagggttgcgctttagcactttcagcaagatccttcatgccactgcgtttcattcaggagcttgctgaaagtctaaagcgcatcctttaggtaaagggg

SEQ ID NO: 17114 - RNA, 171 nt, unidentified
  source 1..171: mol_type = other RNA; note = Related to NZ_CP033901.1; note = Klebsiella quasipneumoniae
acctttacgcgtgggataacaggtttatccttgtcgggcgtttcgccagacactaacttattgtggacatttagggttgcgcttcagcactttcagcaagatccttcattccactgcgtttcatttcaggagcttgctgaaagtctaaagcgcatcctttaggtaaagggg

SEQ ID NO: 17115 - RNA, 171 nt, unidentified
  source 1..171: mol_type = other RNA; note = Related to NZ_CP049115.1; note = Pantoea stewartii
gcctttacgagtgggataaaagttttatccttgtcgggcgtttcgccagacactaacttattgtggacatttagggttgcgctttagcactttcagcaagatccttcattccactacgttacatttcaggagcttgctgaaagtctaaagcgcatcctttaggtaaaggtc

SEQ ID NO: 17116 - RNA, 173 nt, Escherichia coli
  source 1..173: mol_type = other RNA; note = Related to ABCQBJ010000001.1
acctttacgcgtgggataacaaatggtttatccttgtcgggcgtttcgccagacactaatttattgtggatatttagggttgcgcttcagcactttcagcaagatccttcattccactgcgtttcattcaggagcttactgaaagtctgaagcgcatcctttaggtaaaggat

SEQ ID NO: 17117 - RNA, 170 nt, unidentified
  source 1..170: mol_type = other RNA; note = Related to NZ_CP023484.1; note = Dickeya sp.
gcctttacgcgtgggataatctttttatcctagtcgggcgtttcgccagactctaacttattgtggatatttagggttgcgcttcagcactttcagcaagatccttcattccactgcgtttcattcaggagcttactgaaagtctgaagcgcatcctttaggtaaagggt

SEQ ID NO: 17118 - RNA, 170 nt, unidentified
  source 1..170: mol_type = other RNA; note = Related to RJLS01000002.1; note = Dickeya undicola
gcctttacgcgttgggataatgttttatcctagtcgggcgtttcgccagactctaatttattgtggacatttagggttgcgcttcagcactttcagcaagatccttcattccactgcgtttcattcaggagctcactgaaagtctgaagcgcatccttcaggtaaaggat

SEQ ID NO: 17119 - RNA, 169 nt, unidentified
  source 1..169: mol_type = other RNA; note = Related to JZYL01000045.1; note = Pluralibacter gergoviae
ctctttacgcgtgggatatttttatcctagtcaggcgtttcgccagactctaacttattgtggatttctagggttgcgcttcttagtttgagcgggatcctgctctccactcagtcgtttcgtttaggatcccgctcaaactaagaagcgcatcctctaggtaaagggt

SEQ ID NO: 17120 - RNA, 169 nt, Citrobacter sp.
  source 1..169: mol_type = other RNA; note = Related to JADVIA010000001.1; note = Citrobacter braakii
ctctttacgcgtgggatatttttatcctagtcgggcgtttcgccagactctaacttattgtgaatatctagggttgcgcttcgtcgtttgagcgggatcctgcattccactaagtcgttccaattaggatcccgctcaaacgaagaagcgcatcctctaggtaaagggt

SEQ ID NO: 17121 - RNA, 160 nt, unidentified
  source 1..160: mol_type = other RNA; note = Related to MVGB01000005.1; note = Serratia marcescens
ctctttacgcgtgggatatattatttgttatcctagtcgggcgattagccagactctaacttattgcgaataattgggttgcgctaaatacttttggcacgatcctgagcaagcacaggagcgcgccaaaagtatttagcgcatcctctaggtaaagaga

SEQ ID NO: 17122 - RNA, 157 nt, unidentified
  source 1..157: mol_type = other RNA; note = Related to NZ_CABHXL010000034.1; note = Yersinia kristensenii
ctctttacgcgtgggatatttatccttgtccggcgattcgccagacactaatttattgcgaacatttagggttgcgcttaagcacttttggcacgatccttcgctaatcactcaggaatgtgccaaaagtctgaagcgcatcctctaggtaaagaga

SEQ ID NO: 17123 - RNA, 160 nt, unidentified
  source 1..160: mol_type = other RNA; note = Related to NZ_CACSJK010000006.1; note = Rahnella variigena
ctctttacgcgaagggtaacttagttattatccttgtcgggcgtttcgccagactctaacttattgcgtgtgattgggttgcgctaaatacttttggcacgatccttcgcgcactcaggagcgcaccaaaagcatttagcgcatcctctaggtaaaggga

SEQ ID NO: 17124 - RNA, 162 nt, Enterobacter cloacae
  source 1..162: mol_type = other RNA; note = Related to JAJFTC010000002.1
ctctttacgcgaaggataacaatcaggttaatccttagtcgggcgtttcgctagactctaacttattgcgtgtgattgggttgcgctaaatgcttttggcacgatccttcacaagctcaggagcgcaccaaaagcatttagcgcatcctctaggtaaaggga

SEQ ID NO: 17125 - RNA, 160 nt, unidentified
  source 1..160: mol_type = other RNA; note = Related to JPOT02000001.1; note = Pantoea agglomerans
ctctttacgcgaaggataccaaacggtttatccttgtcgggcgtttcgccagactctaacttattgcgtgtgattgggttgcgctaaatacttttggcacgatcctgcgcaagcttaggagcgcaccaaaagcatttagcgcatcctctaggtaaagaga

SEQ ID NO: 17126 - RNA, 154 nt, unidentified
  source 1..154: mol_type = other RNA; note = Related to NZ_CP034938.1; note = Pectobacterium odoriferum
atctttacgcgtgggtttatagtattaaacctagtcgggcgattagccagacatacagtattgaggacacttagggttgcgcaaaagcacttctctaacgatccttaatcaggagcgtcagagaagtcttttgcgcatcctctaggtaaagatt

SEQ ID NO: 17127 - RNA, 155 nt, Citrobacter sp.
  source 1..155: mol_type = other RNA; note = Related to JADVFW010000007.1; note = Citrobacter braakii
atctttacgcgaaggtttatgttacttaaacctagtcgggcgattagccagacatacagtattgaggacacttagggttgcgcaaaagcacttctctaacgatccttgatcaggagcgtcagagaagtcttttgcgcatcctctaggtaaagatt

SEQ ID NO: 17128 - RNA, 153 nt, unidentified
  source 1..153: mol_type = other RNA; note = Related to JAKZMT010000006.1; note = Pantoea ananatis
atctttacgcgtgggtttaaagaattaaacctggtcgggcgattagccagacatctagtattgaggacacttagggttgcgcaaaagcacttctctaacgatccttggcaggagcgtcagagaagtcttttgcgcatcctttaggtaaagatc

SEQ ID NO: 17129 - RNA, 156 nt, unidentified
  source 1..156: mol_type = other RNA; note = Related to JAAAXN010000025.1; note = Serratia fonticola
atctttacgcgtgggtttataagttagtaagcctggtcgggcgataagccagacatacagtattgaggactcttagggttgcgcaaaagcacttctctaacgatccttaatcaggagcgttagagaagtcttttgcgcatccttcaggtaaagata

SEQ ID NO: 17130 - RNA, 161 nt, Vibrio sp.
  source 1..161: mol_type = other RNA; note = Related to NZ_CP049914.1
tcctttacgcgttggttttgttacaaacagaacttgtcgggcgcatcgccagacagtaatttattgtggacatttagggttgcgcttcagcactttccgcacgatccttcgttcctcaggagcgcacgaaaagtcttcagcgcctcctttaggtaaaggca

SEQ ID NO: 17131 - RNA, 159 nt, Vibrio sp.
  source 1..159: mol_type = other RNA; note = Related to NZ_CP053541.1; note = Vibrio europaeus
tcctttacgcgtggttttgtatgtacaaaacttgtcgggcgtatcgctagacagtaatttattgaggatatttagggttgcgcttcagcactttccgcacgatccttcgttcctcaggagcgcacgaaaagtcttcagcgcatccttaaggtaaaggtt

SEQ ID NO: 17132 - RNA, 162 nt, Aeromonas sp.
  source 1..162: mol_type = other RNA; note = Related to NZ_LR134376.1; note = Aeromonas encheleia
gcctttacgcgtgggttttgtcattgtacaaaccttgtcaggcgattcgccagacagtaacttattgtggacatttagggttgcgcttcagtactttccgcacgatccttcgtccctcaggagcgcacgaaaagtcttcagcgcatcctttaggtaaaggtt

SEQ ID NO: 17133 - RNA, 164 nt, unidentified
  source 1..164: mol_type = other RNA; note = Related to CP001796.1; note = Pseudoalteromonas sp.
ctctttacgcgtgggataacgcacaacagtttatccttgtcgggcgattagccagacactattttattgaaggtatttagggttgcgctaaagcacttctctaaagatccttcgttcctcaggagcgttagagaagtcttcagcgcatcctctaggtagagaga

SEQ ID NO: 17134 - RNA, 164 nt, Vibrio parahaemolyticus
  source 1..164: mol_type = other RNA; note = Related to NZ_CAJOAG010000011.1
ctctttacgcgtgggataacgcaaaacagtttatccttgtcgggcgattagccagacactaacttattgaaggtatttagggttgcgctaaagcacttctctaaagatccttcgttcctcaggagcgttagagaagtcttcagcgcatcctctaggtaaaggga

SEQ ID NO: 17135 - RNA, 185 nt, Vibrio sp.
  source 1..185: mol_type = other RNA; note = Related to MCWA01000032.1; note = Vibrio splendidus
ctctttacgcgtaagatagcaaacagtttgtttatctttgtcgggcgtttcgctagacactaacttattgagaacatttagggttgcgctgaagcactttcagtaggatccttcgctctccctcgtacctcggtcgcgctcacgagcctactaaaagtctccagcgcatcctctaggtaaagagt

SEQ ID NO: 17136 - RNA, 185 nt, unidentified
  source 1..185: mol_type = other RNA; note = Related to WMDC01000029.1; note = Photobacterium carnosum
ctctttacgcgtaagataacaaacgatttgtttatctttgtcgggcgtttcgctagacactaacttattgagaacatttagggttgcgctaaagcactttaagcaagatccttcgctctccctcgtacctcggtcgcgctcacgagctcacttaaagtctccagcgcatcctctaggtaaagagt

SEQ ID NO: 17137 - RNA, 176 nt, unidentified
  source 1..176: mol_type = other RNA; note = Related to NZ_BMYW01000013.1; note = Vogesella alkaliphila
atctttacgcgtaggatactgctctatatttattttgagttgcttatcctgtctggcgtttcgtccagacatatgttattgacgatttttagggttgcgctaaagcacttccctatcgatccttcgtacctcaggagcgctagggaagtctttagcgcatcctttaggtaaagata

SEQ ID NO: 17138 - RNA, 175 nt, unidentified
  source 1..175: mol_type = other RNA; note = Related to JACYUE010000003.1; note = Oxalobacteraceae bacterium
taccttacgcgtagggcagattcgtagttggttgcatttgtccttgtcgggcgattagccagacacaaatttattgaggatatttaggttgcgtcaagagctcgcctaacgatccttcgaaaccccacctcaggagcgttagtcaatctcttaacgcatcctttaggtaaggaaa

SEQ ID NO: 17139 - RNA, 166 nt, unidentified
  source 1..166: mol_type = other RNA; note = Related to NZ_JACHXD010000002.1; note = Massilia violacea
taccttacgcgtgggacagatttattttttgtccttgtcgggcgtttagccagacacgaatttattgaggatatttaggttgcgttaaaggcttgcctaacgctccctcgataccccacctcgcgatcgttagtcaagcctttaacgcatcctttaggtaaggaaa

SEQ ID NO: 17140 - RNA, 176 nt, Alcaligenes sp.
  source 1..176: mol_type = other RNA; note = Related to JAKUDK010000002.1
ttccttacgcgttgggacagattctgaatcgacaatatttgtccttgtcgggcgtttagccagacactcatttattgaggatatttaggttgcgtcaaacgcgcgcttaacgatccttcgaaaaagcacctcaggagcgttaagcgcgcgtttgacgcatccttaaggtaaggaaa

SEQ ID NO: 17141 - RNA, 165 nt, unidentified
  source 1..165: mol_type = other RNA; note = Related to NZ_CP086370.1; note = Massilia sp.
ctctttacgcgcggggttagtagatactttacgtaatccttgtcgggcgcttagccagacactaatttattgaggacacttaggttgcgttaaatgctttcctaacgatccttcgtgcctcaggagcgttaggaaaccctttaacgcctcctttaggtaaagagt

SEQ ID NO: 17142 - RNA, 178 nt, unidentified
  source 1..178: mol_type = other RNA; note = Related to NZ_CP048832.1; note = Janthinobacterium lividum
tactttacgtgtgggatacattccttcataagaatttgtccttgtcgggcgcttcgctagacactaatttattgcggatatttagggttgcgttaaagacttccctatcgatccttcctccactgcgttccctcaggatcgctaggaaagcctttaacgcttcctttaggtaaagtat

SEQ ID NO: 17143 - RNA, 170 nt, Pseudomonas sp.
  source 1..170: mol_type = other RNA; note = Related to DAFPVK010000010.1; note = Pseudomonas aeruginosa
ctctttacgcgttgggatatgaatggctctgtaattgatatcctggtcgggcgattcgccagaccctcacttattgaggatttttagggttgcgctaaaggcttctctatcgatccttcgttcctcaggagcgctagagaagcctttagcgcatcctctaggtaaagagt

SEQ ID NO: 17144 - RNA, 162 nt, unidentified
  source 1..162: mol_type = other RNA; note = Related to JAKFZQ010000002.1; note = Pseudoalteromonas sp.
actctttagcgattttgggctttgacattctagcctagtcgggcgattagccagactctaacttattgagcacatctagggttgcgttatataaatttataccgatccttcgtgcctcaggagcggcataaatttatataacgcttcctctagtaaagagta

SEQ ID NO: 17145 - RNA, 162 nt, unidentified
  source 1..162: mol_type = other RNA; note = Related to NZ_LR877185.1; note = Pseudoalteromonas sp.
actctttagcgttgggatgattccttgaattaacctagtcgggcgattagccagactctaacttattgagcacatttagggttgcgttataaagttttataacgatccttcgtgcctcaggagcgctataaaactttataacgcttcctctagtaaagagtg

SEQ ID NO: 17146 - RNA, 164 nt, Vibrio sp.
  source 1..164: mol_type = other RNA; note = Related to NZ_LBGP01000014.1; note = Vibrio metoecus
gctctttagcgttttgggtagaatttgaattcaaccttgtcgggcgtttcgctagacactaacttattgattgtatttagggttgcgttagaacttttctaacgatccttcgtacctcaggagcgtcagagaaagttctaacgctagcctctgagtaaagagtt

SEQ ID NO: 17147 - RNA, 163 nt, unidentified
  source 1..163: mol_type = other RNA; note = Related to BMPZ01000002.1; note = Shewanella gelidii
actctttagcgtttgggtagaataccaattcaaccttgtcgggcgattcgctagacactaacttattgagtgtatttagggttgcgttagaacttttctgacgatccttcgtacctcaggagcgtcagagaaagttctaacgctagcctctgagtaaagagta

SEQ ID NO: 17148 - RNA, 162 nt, Vibrio sp.
  source 1..162: mol_type = other RNA; note = Related to JAEMEZ010000008.1; note = Vibrio cholerae
actctttagcgtttgggtcgaatttgaattcaaccttgtcgggcggttcgccagacactaacttattgagtgcatttagggttgcgttagaacttttctaacgatccttcgtgcctcaggagcgtcagaaaagttctaacgctagcctctgagtaaagagta

SEQ ID NO: 17149 - RNA, 161 nt, Vibrio sp.
  source 1..161: mol_type = other RNA; note = Related to NZ_CP026321.1; note = Vibrio campbellii
actctttagcgtttgggttgataaatatcacaccttgtcgggcggttcgccagacactaacttattgagtgcatttagggttgcgttagaacttttctaacgatccttcgtgcctcaggagcgtcagaaaagttctaacgctagcctctgagtaaagagtt

SEQ ID NO: 17150 - RNA, 160 nt, Vibrio sp.
  source 1..160: mol_type = other RNA; note = Related to VHSP01000001.1
actctttagcgtttgggtcgaatttcagttcaaccttgtcgggcgattcgctagacactaacttattgagtgcatttagggttgcgttagaacttttctaacgatcctcgtgcctcggagcgccagaaaagttctaacgcgagcctctgagtaaagagtt

SEQ ID NO: 17151 - RNA, 163 nt, unidentified
  source 1..163: mol_type = other RNA; note = Related to JACJEU010000008.1; note = Shewanella sp.
actctttagcgtattggattaagttataacttaatcttgtcgggcgtttcgccagacactaatttattgagcatatttagggttgcgttagaacgttttctaacgatccttcgttcctcaggagcgccagaaaagttctaacgctggccactagtaaagagtt

SEQ ID NO: 17152 - RNA, 163 nt, Vibrio sp.
  source 1..163: mol_type = other RNA; note = Related to RKQY01000017.1; note = Vibrio crassostreae
gctctttagcgtattgggtcgagtgtaaactcaaccttgtcgggcgtttcgccagacactaacttattgagtgtatttagggttgcgttagaacgttttctaacgatccttcgtacctcaggagcgtcagaaaagttctaacgctagcctctagtaaagagtt

SEQ ID NO: 17153 - RNA, 162 nt, unidentified
  source 1..162: mol_type = other RNA; note = Related to NZ_FOHV01000012.1; note = Thorsellia anophelis
accttttagcgaatatgaagtaagctttgttacttcttgtcaggcgtttcgccagactaaatcttattgattttatttagcttgcgttggagctgttttgcctatccttcgctagcttcggataggcaaaacagctccaacgctatcctaaagtaaaaggtt

SEQ ID NO: 17154 - RNA, 165 nt, unidentified
  source 1..165: mol_type = other RNA; note = Related to NZ_CP088265.1; note = Leclercia sp.
actctttagcgtatgggctttagttatatagccttgtcgggcgtttcgccagacacgaacttattgtttacatttagggttgcgtcagatgcaaatcggccgatcctgctcgctcactcacacgatcggccgatttgcatccgccgcatcctttagtaaagagtt

SEQ ID NO: 17155 - RNA, 161 nt, unidentified
  source 1..161: mol_type = other RNA; note = Related to CP020501.1; note = Serratia marcescens
actctttagcgtatgggcttcaatacagccttgtcgggcgtttcgccagacactaacttattgtttagatttagggttgcgtcagatgcaaatcggccgatcctgctcgttcctcacacgatcggccgatttgcatccgccgcatcctttagtaaagagtt

SEQ ID NO: 17156 - RNA, 182 nt, Pseudomonas sp.
  source 1..182: mol_type = other RNA; note = Related to NZ_JADBHI010000015.1; note = Pseudomonas arcuscaelestis
ctctttacgcgttttaggagctttcgagctctagtctggtgtatagccggactctaatttattgaacggtattagttgcgacgaaggctcgcgtgggcttcactcgtcgcactcgtgccttagcactcgcactcctcgcaaatcccacgcgagccttcgccgctatatctttggtaaagaga

SEQ ID NO: 17157 - RNA, 174 nt, Pseudomonas sp.
  source 1..174: mol_type = other RNA; note = Related to NZ_CP025261.1
ctctttacgcgttttaggagctttcgagctctagtccggtgtatagccagactctaatttattgaacggtattagttgcgacgaaggctcgcgtgggcttcactcgtcgcactcgtacctcgcactcctcgcaaagcccacgcgagccttcgccgctatatcttggtaaagaga

SEQ ID NO: 17158 - RNA, 172 nt, Pseudomonas sp.
  source 1..172: mol_type = other RNA; note = Related to NZ_CP067098.1
ctctttacgcgttttggagcgcaagctctagtccggtgtatagccagactctaatttattgattggtattagttgcgacgaaggctcgcgtgggcttcactcgtcgcactcgtacctcgcactcctcgcaaagcccacgcgagccttcgccgctatatctttggtaaagaga

SEQ ID NO: 17159 - RNA, 161 nt, Pseudomonas sp.
  source 1..161: mol_type = other RNA; note = Related to DORR01000095.1
ctctttacgcgtttttggagcgcaagctctagtccggtgtatagccagactctaatttattgatcggctttagttgcgacgaaggctcgtgtgggcttcagtcgtcgttcctcctcctaaagcccacacgagccttcgtcgctatatctttggtaaagaga

SEQ ID NO: 17160 - RNA, 172 nt, Pseudomonas sp.
  source 1..172: mol_type = other RNA; note = Related to NZ_JAHSTY010000001.1; note = Pseudomonas azadiae
ctctttacgcgttttggagcgcaagctctagtccggtgtatagccagactctaatttattgattggcattagttgcgacgaaggctcgcgtgggcttcactcaaagcgctcgtccctcgcactcctcgcgaatcccacgcgagccttcgccgctatatctttggtaaagaga

SEQ ID NO: 17161 - RNA, 162 nt, Pseudomonas fluorescens
  source 1..162: mol_type = other RNA; note = Related to LKEF01000044.1
ctctttacgtgttttggagcttcactgctctagtcgggtgtatagccagactctaatttattgattggctttagttgcgacgaagtcccgcgtgggcctcagtcgtcgttcctcctcctaaagcccacgcgggacttcgtcgctatatctttggtaaagagc

SEQ ID NO: 17162 - RNA, 162 nt, Pseudomonas sp.
  source 1..162: mol_type = other RNA; note = Related to FOQB01000015.1; note = Pseudomonas syringae
ctctttacgtgctttggagcttcattgctctagtcgggtgtatagccagactctaacttattgattggctttagttgcgacgaagtcccgcgtgggcctcagtcgtcgttcctcctcctaaagcccacgcgggacttcgtcgctatatctttggtaaagagc

SEQ ID NO: 17163 - RNA, 161 nt, Pseudomonas sp.
  source 1..161: mol_type = other RNA; note = Related to NZ_CP077085.1; note = Pseudomonas shahriarae
ctctttacgtgctttggggcttcgtgctctagtcgggtgtatagccagactctaatttattgatcggctttagttgcgacgaagtcccgcgtgggcctcagtcgtcgttcctcctcctaaagcccacgcgggacttcgtcgctatatctttggtaaagagc

SEQ ID NO: 17164 - RNA, 170 nt, Pseudomonas sp.
  source 1..170: mol_type = other RNA; note = Related to NZ_VDNQ01000002.1; note = Pseudomonas oryzihabitans
ctctttacgcgtttttggagctttgattttataaggctctagtcgggtgtatagccagactcaaaattattgattggctttagttgcgacgaagttccgcggggacttcagtcgccgttccgcctcctaaagcccccgcgaaacttcgtcgctatatcttggtaaagagc

SEQ ID NO: 17165 - RNA, 160 nt, unidentified
  source 1..160: mol_type = other RNA; note = Related to NC_015554.1; note = Alteromonas naphthalenivorans
atctttacgcgtttttatgggcttaggccctagtcgggtgtatagccagactctaatttattgattggatttagttgcgatgaatgcctatctggaattcatcttcgttcctcagctaaattccagataggcattcatcgctatatctgaggtaaagata

SEQ ID NO: 17166 - RNA, 159 nt, unidentified
  source 1..159: mol_type = other RNA; note = Related to JADZHD010000030.1; note = Shewanella algae
atctttacgtgatttaagagcctcggctctagtcgggtgtatagccagactctaacttattgattggatttagttgcgatggatgcctatccgggattcatcttcgtccctcagctaaatcccggataggcatccatcgctatatctgaggtaaagata

SEQ ID NO: 17167 - RNA, 162 nt, Chromobacterium sp.
  source 1..162: mol_type = other RNA; note = Related to NZ_CP029554.1; note = Chromobacterium phragmitis
tactttacgcgttttacgggctttaatggcctagtcgggtggatagccagactctaacttattgatcggcataggttgcgatgaaggatcggcttggtttcagccgctccttagcggccaaaaccaagccgatccttcatcgcttcattcttggtaaagagc

SEQ ID NO: 17168 - RNA, 166 nt, unidentified
  source 1..166: mol_type = other RNA; note = Related to NZ_KB913033.1; note = Hydrogenovibrio halophilus
ctctttacgtgttaaatgagttaacgaattcatttagtcaggtgtttagccagactttagtttattgattggcattaggctgcgctgaaggctttttagccttcattacgctcctacgtcgctagaaggctaaaaagccttcagcgctgccgttgaggtaaagtgc

SEQ ID NO: 17169 - RNA, 170 nt, unidentified
  source 1..170: mol_type = other RNA; note = Related to JAKISK010000029.1; note = Thiomicrorhabdus sp.
ctctttacgtgtttaagcattgtgtatatgttttagtctggtgtaaatcggacgcaattttattgtggacatttggccgcgcagaagtataaaaatacttcgctccacgcttgttccaatccctgcgcaaagtatttttatacttctgcgctactctcgaggtaaagagc

SEQ ID NO: 17170 - RNA, 182 nt, unidentified
  source 1..182: mol_type = other RNA; note = Related to BLYD01000277.1
ctctttacgtgttttatgaggcacaatcattaatttagtgctttagtctggcgtatagcaagactcatgtttattgagcggttttaattgcgataaagtctctttcagacttcatcgccatccgctttgctccagttgtgaagtctgaaagagactttatcgctttctttaaggtaaagagt

SEQ ID NO: 17171 - RNA, 159 nt, Pseudomonas sp.
  source 1..159: mol_type = other RNA; note = Related to NZ_KE384408.1; note = Pseudomonas azotifigens
ctttttacgcgttttggtgctgttttatgcactagtcgggtgtacagccagactcaaatttattgatcggctttagttgcgacgaatgtccgtctgggcttcactcgcttcactcctaaagcccagacgaacattcgtcgcattcttttggtaaaaagc

SEQ ID NO: 17172 - RNA, 141 nt, Pseudomonas sp.
  source 1..141: mol_type = other RNA; note = Related to JACAOT010000014.1; note = Pseudomonas tolaasii
ctctttacgcgtttatgtgcgcaagcactagtcgggtgtatagccagactctaagttattgatgtgatttagttgcgacggatggtcgggcgggctnnnnagcccgcccgaccatccgtcgctatatccttggtaaagagc

SEQ ID NO: 17173 - RNA, 152 nt, unidentified
  source 1..152: mol_type = other RNA; note = Related to CAJHIV010000001.1; note = Methylomonas albis
ctctttacgcgtttatatggaaatttaagtatgtcgggcgctcagccagacccaaaattattgataagatttagttgcgcagaaggcttcttcggtcttccgcgtcgctacagcccaaagaagccttctgcgcttccttaaaggtaaagagt

SEQ ID NO: 17174 - RNA, 171 nt, Vibrio sp.
  source 1..171: mol_type = other RNA; note = Related to NZ_QLYY01000008.1
acctttacgcgtggatttgaaaaacgagaattcgttgttcaatcttgtcgggcgctcagccagacaaatgtttattgaggatatttagggctgcgcaagcatcgctttgcacgatccttcgttcctcaggagcgcacaaagcgatgcttgcgcttcctttaggtaaaggca

SEQ ID NO: 17175 - RNA, 170 nt, Vibrio sp.
  source 1..170: mol_type = other RNA; note = Related to JAHVKH010000015.1; note = Vibrio hangzhouensis
acctttacgcgtagttttgaacaacgtactttcgttattcaatcttgtcgggcgttcagccagacacatgtttattgaggttatttaggtcgcgcaagcatcgctttgcacgatccttcgtgcctcaggagcgcacaaagcgatgcttgcgccccctttaggtaaaggca

SEQ ID NO: 17176 - RNA, 169 nt, Vibrio sp.
  source 1..169: mol_type = other RNA; note = Related to MSCG01000002.1; note = Vibrio splendidus
acctttacgcgtggatttgaggatgcttgtcattcttgatcttgtcgggcgcttagccagacacactgtttattgaggacatttagggctgcgcaagcatagcttcgcacgatccttcgttcctcaggagcgcacgaagctatgcttgcgcttcctttaggtaaaggaa

SEQ ID NO: 17177 - RNA, 171 nt, Vibrio sp.
  source 1..171: mol_type = other RNA; note = Related to NZ_CP049331.1; note = Vibrio ziniensis
acctttacgcgtggatactgagttgacgctgttaacttatatcttgtcgggcgtttagccagacacacagtttattgaggacatttagggctgcgcaagcttcgctttgcacgatccttcgttcctcaggagcgcacaaagcgaagcttgcgcttccttaaggtaaaggca

SEQ ID NO: 17178 - RNA, 154 nt, Vibrio sp.
  source 1..154: mol_type = other RNA; note = Related to RHPA01000002.1; note = Vibrio cholerae
ctctttacgcgaattggggtgaaaaccctagtcgggtgtacagccagactcaaatttattgagcgggattaggtgcgctagaggcctctgcgggccccagtcgcaggctcctaaaacccgcagaggcctctagcgcttcctttaggtaaagagt

SEQ ID NO: 17179 - RNA, 154 nt, Vibrio sp.
  source 1..154: mol_type = other RNA; note = Related to AAXPSE010000001.1; note = Vibrio vulnificus
ctctttacgcgaattggggtgaaaaccctagtcgggtgtacagccagactcaaatttattgagcgggattaggtgcgctagaggcctctgcgggccccagtcgcaagctcctaaaacccgcagaggcctctagcgcttcctttaggtaaagagt

SEQ ID NO: 17180 - RNA, 178 nt, unidentified
  source 1..178: mol_type = other RNA; note = Related to OBMM01000001.1; note = Thalassospira xiamenensis
ctctttacgcgaggtgctttacggcacggtcaggcgtatcgccagaccctaacttattgacggtttcttggcgcgataagatggtttctttcttatcttattccgcctcgctgaccgcgcttcgtcgaaataagataagaaagaaaccatcttatcgcttcttcttaaggtatagagc

SEQ ID NO: 17181 - RNA, 161 nt, unidentified
  source 1..161: mol_type = other RNA; note = Related to GG703517.1; note = Ruegeria sp.
ctctttacgcgttgtgctaagtggcacggtcaggtgtatagccagacccaattttattgatcgcattttggcgcgataagaagaactctctcttatcgagtccgcgttcgcttgttcgataagagagagctcttcttatcgcttctttaaaggtattgagc

SEQ ID NO: 17182 - RNA, 163 nt, unidentified
  source 1..163: mol_type = other RNA; note = Related to AMRK01000002.1; note = Celeribacter baekdonensis
ctctttacgcggatgtgcggcaacgcacggtctggtgcacagccggaccctaatttattgatcgcatcttggcgcgataagaacataaagtccttatcgctcttgcaagtattcagaacaataaggactttatgttcttatcgcttcttcaaaggtactgagc

SEQ ID NO: 17183 - RNA, 167 nt, unidentified
  source 1..167: mol_type = other RNA; note = Related to LMCG01000004.1; note = Pseudovibrio sp.
atctttacgcggagtgcttgtagagcacggtcgggcttacagctagacccacacttattgacggcatttaagtgcgattggaaggaaaatttcctatcactctcaaagccgtagtttctcgattgacaggaaattttccttccaatcgcccctttgaggtaaagagt

SEQ ID NO: 17184 - RNA, 158 nt, unidentified
  source 1..158: mol_type = other RNA; note = Related to NZ_VFSV01000069.1; note = Paenimaribius caenipelagi
acccttacgcggaacgctcttaatgagcgtagtctggtgtacagccggactctaacttattgatttcattttggcgcgataagaccaagaaggtcttatcaaagccgtagtttcgctaagaccttcttggtcttatcgcaccttcaaaggtagggggc

SEQ ID NO: 17185 - RNA, 156 nt, unidentified
  source 1..156: mol_type = other RNA; note = Related to JAKCFH010000010.1; note = Rhodovulum sulfidophilum
acccttacgcggaacgctctactgagcgtagtctggtgtacagccggactctaacttattgttaccatttgggcacgataagaccaagaaggtcttatcaaagccgtagtttcgataagaccttcttggtcttatcgcacctttaaggtaggggcc

SEQ ID NO: 17186 - RNA, 144 nt, unidentified
  source 1..144: mol_type = other RNA; note = Related to FONF01000022.1; note = Marinobacter sp.
tcctttacgcgtgctcgtacaagcgagttgtgtctggtggatagccggaccctgaattattggaggcatttaggtgcgctggaggcgctacagtctcctatgcggagcctgtagcgcctccagcgcccctttaaggtaaaggac

SEQ ID NO: 17187 - RNA, 157 nt, Desulfovibrio desulfuricans
  source 1..157: mol_type = other RNA; note = Related to NZ_CP072608.1
ctctttacgcggtaagtcttgtccaacaaggctgagtctgatgtttcgtcagacagaattttattgttagctgttatcggcacttcgggccttcgcattatctcccgaagcctccgataatgcgaaggcccgaagtgcctctctctaggtaaagaga

SEQ ID NO: 17188 - RNA, 155 nt, unidentified
  source 1..155: mol_type = other RNA; note = Related to JAFXQN010000116.1; note = Alphaproteobacteria bacterium
atctttacgtgctaaggagttatactctaatgtctgatgtttgattggactgctcgtttattgttacattttatcgtccttgggactctgatatttcatctcccttgctgtacgataaaatatcagagtcccaaggactttcaaaggtaaagatg

SEQ ID NO: 17189 - RNA, 151 nt, unidentified
  source 1..151: mol_type = other RNA; note = Related to PBKZ01000009.1; note = Rheinheimera sp.
gaagttgtgcttattcaagcgtaacttttgtggttggtgtatagccaacccgaatagatcgtgatgtatccatgtggtactaaacagaatctccatctgctctagagcagattgaccttctgtttagtacccagaagatcagataatctcc

SEQ ID NO: 17190 - RNA, 176 nt, unidentified
  source 1..176: mol_type = other RNA; note = Related to LZFG01000013.1; note = Photobacterium phosphoreum
agcccttagtgaggtttgttttctataaaatgaacctttgtggttggtgtatagccaacccgtagagattgctcgatatttgttgatactaaacagagacgagctgctcatccttcgcagaacgtctctgtttagtatcacagaagtttcgcaagctcactcctgagtaagggctt

SEQ ID NO: 17191 - RNA, 179 nt, Vibrio sp.
  source 1..179: mol_type = other RNA; note = Related to SMCU01000001.1; note = Vibrio crassostreae
agcccttagtttggttgctttcgagtagcctatggttggtgtatagccgacctgacgacattgatcgtgattgtgttgcactaaacagaaacacgatccgttcgtacctcactgagcgtgtttctgtttagtgcaagccgtttcacttgctgcgcaagttcacgcctttgtaagggctt

SEQ ID NO: 17192 - RNA, 175 nt, unidentified
  source 1..175: mol_type = other RNA; note = Related to NZ_WMDI01000001.1; note = Photobacterium carnosum
acccttagttctggttgcttttaagtaatcaatggttggtgtatagccgacctgacgacattgattgtaattgtgttgcactaaacataattacgatccgtgagtgcctcactgagcgtaattatgtttagtgcagacgttcacttgctacgcagtttacgtctttgtaagggtt

SEQ ID NO: 17193 - RNA, 178 nt, Vibrio sp.
  source 1..178: mol_type = other RNA; note = Related to NZ_ADAF01000002.1; note = Vibrio mimicus
agcccttagcgtggttactttcgggtagccaacggttggtgtatagccgacctgacgaaattgatcgtgattgtgttgcactaaacagaatcacgatccgttcgtacctcactgagcgtgattctgtttagtgcaagccgtttcgcttgctgcgcaacctcacgccttgtaagggctt

SEQ ID NO: 17194 - RNA, 179 nt, Vibrio sp.
  source 1..179: mol_type = other RNA; note = Related to NZ_JPTQ01000476.1; note = Vibrio harveyi
agcccttagcgtggctactttcgagtagcctatggttggtgtatagccgacctgacgaaattgatcgtgactgtattgcactaaacagattcacgatccgttcgtacctcacggagcgtgattctgtttagtgcaagccgtttcgcttgctgcgcaacctcacgccttagtaagggctt

SEQ ID NO: 17195 - RNA, 180 nt, Vibrio sp.
  source 1..180: mol_type = other RNA; note = Related to NZ_CP046834.1; note = Vibrio vulnificus
agcccttagttttggttacccttgggtaatctatggtaggtgtatagccaacctgatggaattgatccggattatgttgcactaaacataatcaagatccattcgtacctcatggagcgtgattatgtttagtgcaagccgtttcacttgctacgcaagttcacgccttggtaagggctt

SEQ ID NO: 17196 - RNA, 175 nt, unidentified
  source 1..175: mol_type = other RNA; note = Related to JQED01000055.1; note = Colwellia psychrerythraea
tatccttagtttgaagaaagtgcctcggtattttcttttgtggttggtgtatagccgacccgttcgtattgttcggaattgtagtacgtaactacgtaaattccgaaccgctcggaactcgctgagcgtaatttacgtagttacgtacagtcgcaggctcctctagtaaggatat

SEQ ID NO: 17197 - RNA, 160 nt, unidentified
  source 1..160: mol_type = other RNA; note = Related to NZ_VWXD01000007.1; note = Pantoea sp.
tacccttagtttggaagtgcttaggcatttcttgtggttggtgtatatccgacccgttactattgtttggtttctcgtcgcaagaacgcgaggcgtcacgaggctccactcgcctcgagccacctcgcgatcttgcgcctcgtaacctgtgtaagggcat

SEQ ID NO: 17198 - RNA, 159 nt, unidentified
  source 1..159: mol_type = other RNA; note = Related to NZ_CABDVS010000002.1; note = Raoultella planticola
tacccttagtttggaagtgcttaggcatttcttgcggttggtgtatatccgacccgttactattgtttggtttctcgccgcaagaacgcgaggcgtcacgaggctcgctagcctcgtgccacctcgcgagctcgcgtctcgtaacctgtgtaagggcaa

SEQ ID NO: 17199 - RNA, 157 nt, unidentified
  source 1..157: mol_type = other RNA; note = Related to CP077366.1; note = Pantoea agglomerans
acccttagtttggaagtgctccggcatttcttgtggttggtgtatatccgacccgttactattgtttggtttctcgtcgcaagaacgcgaggcgtcacgaggacagccgtcctcgtgccacctcgcgatcttgcgcctcgtaacctgtgtaagggct

SEQ ID NO: 17200 - RNA, 159 nt, unidentified
  source 1..159: mol_type = other RNA; note = Related to CP026980.1; note = Pectobacterium parmentieri
tacccttagtctgggagtgcttattgcatttcttgcggttggtgcttagccgacccgattatattgtttggtttctcgtcgcaagatcgagccgcggcacgaggacctcatcctcgagccacgtctcgagctcacgcctcgtaacctatgtaagggtaa

SEQ ID NO: 17201 - RNA, 168 nt, Enterobacter sp.
  source 1..168: mol_type = other RNA; note = Related to FVZI01000003.1
gcccttagtttggaaagtgcaaatgcattttcttgcagttggtgtatagccgactcgatattgttgtttggtttctcgccgcacgatcgcgaggcgtcacgaggcgttgcgagccctcacgcctcgtgacgcctcgcgagcccacgtctcgtaaccagtgtaagggta

SEQ ID NO: 17202 - RNA, 146 nt, Enterobacter cloacae
  source 1..146: mol_type = other RNA; note = Related to BPMY01000001.1
tacccttagttagaaagcatgcagcatgctttcttgtggttggtgtatagccgacccggtgtagttgtgtggtttctcaccgcgagatcgagaagtgtctcgccgacacttctcgagcttgcgcttcgtgacctgtgtaagggaat

SEQ ID NO: 17203 - RNA, 160 nt, unidentified
  source 1..160: mol_type = other RNA; note = Related to NZ_CABHYG010000014.1; note = Yersinia proxima
tgtccttagttagaaagtgcctatgcattttcttgtggttggtgtatagccgacccggtattgttgtgtggtttctcgccacaagatcgcgaggcgtcacgaggcgccctcgcctcgagccacctcgcgagcctgtgtctcgtaacctgtgtaagggcat

SEQ ID NO: 17204 - RNA, 163 nt, Proteus sp.
  source 1..163: mol_type = other RNA; note = Related to NZ_CP054157.1; note = Proteus vulgaris
gcccttagttagaaaatgtgtattttatgcgttttcttgtggttggtgcatagctgacccgatattgttgtgtggtttctcgccacaagatcgcgagtcgtcgcgaggcgatcgcgcctcgctccgcctcgcgagcctgtgtctcgtaacctgtgtaaggggt

SEQ ID NO: 17205 - RNA, 149 nt, unidentified
  source 1..149: mol_type = other RNA; note = Related to CQAZ01000033.1; note = Yersinia pekkanenii
ggcccttagttagagagtgcctaatatggttactttcttgtggttggtgtatagccgacccggtattgttgtttggtttctcatcgcaagatcgggccgcgtcggtagacgcttcccgagcctgcgtctcgtgacctatgtaagggtat

SEQ ID NO: 17206 - RNA, 139 nt, unidentified
  source 1..139: mol_type = other RNA; note = Related to JADUBR010000008.1; note = Serratia marcescens
tacccttagttagggagtgccttaggcgctttcttggttggtgtatagccgacctggttttattgtttggtatctcgccgcacgatcgtgaggtgtctgcacctcacgagcttgcgtctcgtgacctgtgtaagggtaa

SEQ ID NO: 17207 - RNA, 154 nt, Escherichia coli
  source 1..154: mol_type = other RNA; note = Related to CP057980.1
tgcccttagcaggaaagtacattcaatatgttactttctagtggttggtgtttagccaactcgtatggattgcttggtatctcgacacaagttagccttgtgtcatttatagacaccaggctaacttgtgtctcgggaactcttgtatgggcat

SEQ ID NO: 17208 - RNA, 137 nt, unidentified
  source 1..137: mol_type = other RNA; note = Related to NZ_JAEMHM010000012.1; note = Geomesophilobacter sediminis
acccctagttgaaaggagcacaactcctttctgtggttggtgtatagccgacccgtatatattgttggatactctatgcacatgttcgctgaaggtcctttcatcaaacatgtgcttcgcaactccgagtaggggaa

SEQ ID NO: 17209 - RNA, 116 nt, unidentified
  source 1..116: mol_type = other RNA; note = Related to QHPH01000062.1; note = Verrucomicrobia bacterium
cgtcctagtttgtgagggctataccacctctgtgtggctggtgcatagccggcccgtttagattgtacggtattttcgccctccgtttcacggagggctcgctctaagtaggacaa

SEQ ID NO: 17210 - RNA, 165 nt, unidentified
  source 1..165: mol_type = other RNA; note = Related to NZ_FOXY01000012.1; note = Donghicola eburneus
cactcttagctgggtgtttttacgaaaatgctctacgccgggtgattagccaggctgtactagattgaacgacattgggcgccgactttgattggttttgtcggccccggtcttcgcctcggcgccgacaaaaccaatcaaagtcggacgcttaagtaagagaac

SEQ ID NO: 17211 - RNA, 166 nt, unidentified
  source 1..166: mol_type = other RNA; note = Related to NZ_LGHS01000039.1; note = Pseudorhodobacter aquimaris
tactcttagctgggtgttttagccgaaaacgctctatgccgggtgatttgccaggctgtatttgattgaacgactttgggcgccgacttcgaatggttttgtcggccccggtcttcgcctcggcgccgacaaaaccattcgaagtcggacgcttaagtaagagaat

SEQ ID NO: 17212 - RNA, 165 nt, unidentified
  source 1..165: mol_type = other RNA; note = Related to NZ_RBIG01000007.1; note = Oceanibaculum indicum
tactcttagctgggtgtttttgccgaaacactctatgccgggcgatttgccaggctgaatttgattgaacgacattgggcgccgacttcgaataactttgtcggccccggtctacgcctcggcgccgacaaagttattcgaagtcggacgctcaagtaagagaac

SEQ ID NO: 17213 - RNA, 162 nt, unidentified
  source 1..162: mol_type = other RNA; note = Related to CP069017.1; note = Pseudosulfitobacter pseudonitzschiae
ttctcttagctgggtgttttctgaacgctctacgccgggtgattcgccaggctgatttcaattgaacgatatcgggcgccgacttcgaaatgtttgtcgtcaccggtcgttcctcctcggagccgacaaacatttcgaagtcggacgcttaagtaagagatt

SEQ ID NO: 17214 - RNA, 164 nt, unidentified
  source 1..164: mol_type = other RNA; note = Related to NZ_MBST01000045.1; note = Ensifer sp.
cactcttagctgagtgtggttgcgagacactctatgccgggcgattggccaggctgtactcgattgaacgattttgggcgccgacttcgaatcattttgtcggccccggtcgttgcctcggagccgacaaaatgattcgaagtcggacgcttaagtaagagaat

SEQ ID NO: 17215 - RNA, 158 nt, unidentified
  source 1..158: mol_type = other RNA; note = Related to RHWX01000009.1; note = Brevundimonas sp.
atcccttcgctttaagggtgtcactctacgccgggtgtaaaccaggctgtattcgattgcgtgacatgggcaacgacaacgggcttccgtgtcgcccccggtcaagcggactcggcgccgacacggaagcccgttgtcgtcgctcaaagtaagaggtt

SEQ ID NO: 17216 - RNA, 175 nt, unidentified
  source 1..175: mol_type = other RNA; note = Related to JADCLP010000001.1; note = Erythrobacteraceae bacterium E2-1 Yellow Sea
gcctcttagctgggtgaagtccaacttcgggccaaactctatgccgggcgtttagccaggctgaattaaattgcgcgacaatgggcgccgatttcggaatccgaattcgaccccgggctatgtcgcctcggcgccgaattcggattccgaaatcggtcgctctaagtaaggggaa

SEQ ID NO: 17217 - RNA, 174 nt, unidentified
  source 1..174: mol_type = other RNA; note = Related to NZ_CP033204.1; note = Sphingopyxis sp.
gcctcttagctgggtgaagcctaatagaaggccaactctacgccgggtgtttagccaggctgaattaaattgcgcgacaatgggcgccgatttcggaatccgaagtcgaccccgggctcagtcgcctcggcgccgacttcggattccgaaatcggcgcgctcaagtaaggggtt

SEQ ID NO: 17218 - RNA, 156 nt, unidentified
  source 1..156: mol_type = other RNA; note = Related to VBWB01000009.1; note = Rhodospirillaceae bacterium
tccctttggttatcgggggacgctctatgccgggcgtaagccaggctgaaattgattgcgcgagattcggcgccgacttcgggactccgggccggtgccggcctccgtctcggcaccggcccggagtcccgaagtcggccgcttaatgtaagaggt

SEQ ID NO: 17219 - RNA, 167 nt, unidentified
  source 1..167: mol_type = other RNA; note = Related to NZ_AP018907.1; note = Blastochloris tepida
gcctcttagctgggtgcgagccctttggggcaacactctatgccgggtgtaaaccaggctgaatcagattgagtgagtttgggcgccgacttcgggtcccggagcggcgccggctcacactcggcgccgctccgggacccgaagtcggccgctttgagtaagaggca

SEQ ID NO: 17220 - RNA, 159 nt, unidentified
  source 1..159: mol_type = other RNA; note = Related to NZ_BACU01000350.1; note = Azospirillum sp.
ctcccttagtgtaaaagggggcctcactctatgccgggtgtaaaccaggctgaatgtaattgcgaagattgggcgccgacttcggaatccgcggtcggcaccggctttcgctcggcgccgaccgcggattccgaagtcggccgcttagggtaagaggac

SEQ ID NO: 17221 - RNA, 163 nt, unidentified
  source 1..163: mol_type = other RNA; note = Related to NZ_JACNMM010000013.1; note = Oceaniglobus trochenteri
ctctcttagctgggttctagcaagcgagaactctacgccgggtgtttagccaggctgaattgaattggacgctttcgggcgccggcttcggccttcgaagtcgagcccggctgcgctcggtctcgacttcgaaggccgaagccggccgcttaagtaagggaat

SEQ ID NO: 17222 - RNA, 163 nt, unidentified
  source 1..163: mol_type = other RNA; note = Related to NZ_CP033435.1; note = Cereibacter sphaeroides
ctctcttagctgggttctgacaagcgagaactctacgccgggtgattagccaggctgaactgaattgtacgcttttgggcgccgacttcagccttcgaagtcgagcccggcttcgctcggtctcgacttcgaaggccgaagccggacgcttaagtaagaggta

SEQ ID NO: 17223 - RNA, 161 nt, unidentified
  source 1..161: mol_type = other RNA; note = Related to NZ_LGSQ01000001.1; note = Pannonibacter phragmitetus
cctcttagttgggttctgttaagcgagaactctatgccgggtgtatagccaggctgaactgaattggacgcttttgggcgccgacttcggccttcggagtcgagcccggctgcactcggcctcgcctccgaaggccgaagtcggtcgcttaagtaagaggt

SEQ ID NO: 17224 - RNA, 168 nt, unidentified
  source 1..168: mol_type = other RNA; note = Related to NZ_LSRP01000113.1; note = Pararhizobium antarcticum
gcctcttagttgggtgtgtgtagctacaactcactctatgccgggtgtttagccaggctgaattttattgtgcgacattgggcgccggcttcgggaatccgaggcggcaccggcatgcgctcggcaccacctcggattcccgaagccggccgcttaaagtaaggggtc

SEQ ID NO: 17225 - RNA, 168 nt, unidentified
  source 1..168: mol_type = other RNA; note = Related to FMVA01000017.1; note = Rhizobium sp.
gcctcttagttgggtgtgtgtagctacagctcactctatgccgggtgtttagccaggctgaatcttattgtgcgacattgggcgccggcttcgggaatccgaggcggcaccggcatgcgctcggcaccacctcggattcccgaagccggccgcttaaagtaaggggtc

SEQ ID NO: 17226 - RNA, 168 nt, unidentified
  source 1..168: mol_type = other RNA; note = Related to NZ_QJRY01000001.1; note = Rhizobium wuzhouense
gcctcttagttgggtgtgtgtagctacagctcactctatgccgggtgtttagccaggctgaatcttattgtgcgacattgggcgccggcttcgggaatccgagtcggcaccggcatgcgctcggcaccacctcggattcccgaagccggccgcttaaagtaaggggtt

SEQ ID NO: 17227 - RNA, 178 nt, unidentified
  source 1..178: mol_type = other RNA; note = Related to JAIUNO010000183.1; note = Proteobacteria bacterium
gcctcttagctgggtggaacacctttagccaaaggtggcactctacgccgggtgaaagctaggctgtaagcgattgcgcgagtttgggcgccgacttcgaaacccggagccggcaccggccgcgtgcgtctcggcgccgtctccgggttccgaagtcgggcgctctaagtaagagggc

SEQ ID NO: 17228 - RNA, 182 nt, unidentified
  source 1..182: mol_type = other RNA; note = Related to NZME01000040.1; note = Thalassospira sp.
aactcttagtgagggttggtgccttgtctgggcgctcaactcaatgccgggtgcatagccaggcttattctattgcgcgacatggtggcgccggatttagctaatcctgagccattgggtccgcaagtgcttcctcaatggctcaggattagctaaatccggccgcttctaggtaagagttc

SEQ ID NO: 17229 - RNA, 142 nt, unidentified
  source 1..142: mol_type = other RNA; note = Related to JAEUOZ010000023.1; note = Rubrivivax sp.
gccacttagctgaaccgttgtcgggttctgtgccgggtgtacagccaggccgattggcattgaacgacatcgtcgcggcaaatccctcggggttcgcctaacggcgaaccccgagggatttgcctcgtccaagtaggtggct

SEQ ID NO: 17230 - RNA, 141 nt, unidentified
  source 1..141: mol_type = other RNA; note = Related to NESB01000001.1; note = Limnohabitans sp.
gtcacttagctgaaccgcagtcgaggttctgtgccgggcgtacagccaggccgatggcattgaccgacatcgtcaggcgaatccctcggggttcgcctagcgtcgaaccccgagggattcgcctcgtccaagtaggtggca

SEQ ID NO: 17231 - RNA, 153 nt, unidentified
  source 1..153: mol_type = other RNA; note = Related to NZ_CP093331.1; note = Pseudoxanthomonas daejeonensis
gctatctagctggactcaacctgttccatgttgggttccgtgccgggtgtacagccaggccgatcagtttgaacgtcatcgttgcggcgaatccctttgggcttcgcctacggcaaaccccaaagggattcgccgctatcagggtagatagct

SEQ ID NO: 17232 - RNA, 145 nt, unidentified
  source 1..145: mol_type = other RNA; note = Related to JAFLDZ010000021.1; note = Xanthomonadales bacterium
gccacttagctgaaccgttgtcgcggttctgtgccgggcgtacagccaggccgattggtattgatcgacatcgtcgcggcgaatccctctggggtttgcctagcggcaaaccccagagggattcgcctcgatccagtaggtggca

SEQ ID NO: 17233 - RNA, 143 nt, unidentified
  source 1..143: mol_type = other RNA; note = Related to JAFECW010000526.1; note = Proteobacteria bacterium
gccatctagctgaaccaggaaaggttctgtgccgggtgtacagccaggccgaatggtattgaacgactttgtcgtggcgaagccctcacggcttttcctaacgtcaaagccgagagggcttcgccccgatcaagtaggtggcc

SEQ ID NO: 17234 - RNA, 144 nt, unidentified
  source 1..144: mol_type = other RNA; note = Related to DNQH01000067.1; note = Candidatus Andersenbacteria bacterium
gtcagcctagctgaaccgctgtcgaggttctgtgccgggtgtatagccaggccgttttgcattgatcgacatcgtcgttacgaatccctcggggttcgcctaacgtcgaaccccgagggattcgtctcgtccaagtaggtgaca

SEQ ID NO: 17235 - RNA, 162 nt, unidentified
  source 1..162: mol_type = other RNA; note = Related to QFOJ01000011.1; note = Pseudoxanthomonas spadix
gccacttagctgggccctactcagagcataagcttcgataagggttctgtgccgggcgtatagccaggccgattgaattgaacgacatcgtcgcggcgaattcctctggaatccgcctagcgtcgaattccagaggaattcgcctcgtctcagtaggtggca

SEQ ID NO: 17236 - RNA, 176 nt, unidentified
  source 1..176: mol_type = other RNA; note = Related to JACPTK010000096.1; note = Betaproteobacteria bacterium
gcctcttagctgagcatctgtagaaggacgaagaataagcagttgctcttggccgggtgtatagccaggccgaactgaattgcgttagattctctggcgatttagcagaaaaagcggaatcgcctgagggcgattcagctttttctgctaaatcgccacgcctcaagtaagagggc

SEQ ID NO: 17237 - RNA, 162 nt, unidentified
  source 1..162: mol_type = other RNA; note = Related to CP053449.1; note = Proteobacteria bacterium
atcctttagttgagtttgtaaaaattaaatactgactctgttgccgggtgtatagctaggccgttctggattgagtggcatgttccgacaattaaagtgtcgcgtcatgcctctgcgagacatgccacgacactttaattgtcgtatcttaggtaagggatt

SEQ ID NO: 17238 - RNA, 163 nt, unidentified
  source 1..163: mol_type = other RNA; note = Related to JACQAP010000013.1; note = Betaproteobacteria bacterium
gtctcttagttgggcttgttcggtttttaattcgaataatgctcttggcccggtgtaccgccaggccgaattatattgcgcgagactctttgggcaggtttcccagcccgagagctcctcgctctcgggctgggaaacctgcccacgctctgagtaagagaca

SEQ ID NO: 17239 - RNA, 163 nt, unidentified
  source 1..163: mol_type = other RNA; note = Related to SCTX01000106.1; note = Betaproteobacteria bacterium
gtctcttagttgggcttgttcggttttctgttcgaatgacgctcttggcccggtgtacagccaggccgaattatattgcgcgagactctttgggctggtttcccatcccgagagctcctcgctctcgggctgggaaaccagcccacgctcttagtaagagaca

SEQ ID NO: 17240 - RNA, 161 nt, unidentified
  source 1..161: mol_type = other RNA; note = Related to JAIQGJ010000086.1; note = Acidobacteriia bacterium
gcgtcttagctgggtttttcgtgaaatctgcgacagaacctaacgccgggtgttcagccaggctgatttgcattgaacgggattctttgggcggcgaggcaaatccgtcctggagtcccaggacggatttgcctctccgcccaacgcttgagtaagacgca

SEQ ID NO: 17241 - RNA, 169 nt, unidentified
  source 1..169: mol_type = other RNA; note = Related to DQSS01000385.1; note = Arcobacter sp.
tttcctagtttggcttaaaaatatttattaataattaagcttgtgccaggtgtatagccttggtcggattaaattgttacacattgcttgcgaagttctaattttagctctttgcaacatgcgttacaaagagctaaaattagaacttcgcatcttaaaagtaggagcc

SEQ ID NO: 17242 - RNA, 164 nt, unidentified
  source 1..164: mol_type = other RNA; note = Related to JAIZOJ010000089.1; note = Sulfurovum sp.
cttcctagtttggcttaaaaatatttttttattaagcttgtgccaggtgtatagccttggtcgaattaaattgtacacattgcttgcgaagttctaattttagctctttgcaacatgcgttacaaatatctaaaatcagatcttcgcatcttaaaagtaggagc

SEQ ID NO: 17243 - RNA, 156 nt, unidentified
  source 1..156: mol_type = other RNA; note = Related to CP021072.1; note = Aliarcobacter cryaerophilus
actttttagctggcttaaatctaattttgattaaagcttgtgcctgatgattaatcaggtcgaattatattgatggtattggctgcagaaatttaaataaattctcagctccatccgaatcagagaatttatttaaatttctgcatcttaaaagta

SEQ ID NO: 17244 - RNA, 151 nt, unidentified
  source 1..151: mol_type = other RNA; note = Related to CP053451.1; note = Proteobacteria bacterium
gtctcttagctgggcatttcgtttggtacatcaaatgctctatgccgggtgtttagccaggctgaattgtattgattgacattcttgggcgggaattgatttcccgctgctcgcgggaagtcaattcccgccccgcttcgtgtaagagaca

SEQ ID NO: 17245 - RNA, 158 nt, Chromobacterium sp.
  source 1..158: mol_type = other RNA; note = Related to JAFBBB010000001.1; note = Chromobacterium violaceum
gcttcttagctgagttcctagctttaaagcaattctggaactctatgccgggtgtatagccaggctggtaaaaattgatatacattgcgggcgattttaagcataaatcgcctagcggcgatttatgcttaaaatcgccagcacttgtgtaagaagct

SEQ ID NO: 17246 - RNA, 164 nt, unidentified
  source 1..164: mol_type = other RNA; note = Related to JACRMO010000001.1; note = Gammaproteobacteria bacterium
gcctcttagcttggtatttgctcaaagggaaaagtgagcagatgcttaatgccgggtgtaaagccaggctgaattgcattgattggtattctacggcgggttttcacccgcctcatcgtaccgctgagtcgggtgaaaacccgccgcgctctgagtaagaggct

SEQ ID NO: 17247 - RNA, 146 nt, unidentified
  source 1..146: mol_type = other RNA; note = Related to JAFGUG010000057.1; note = Thiotrichales bacterium
agctcttagtctttgagcaataaatttatattgctatgtcaggcgaatcgctagacatttatcgttaattccatctgggccgacttcaaattgaagttccgctccgcaaaacttcaatttgaagtcgtgcattattgtaagagcta

SEQ ID NO: 17248 - RNA, 174 nt, unidentified
  source 1..174: mol_type = other RNA; note = Related to WGNH01000025.1; note = Alphaproteobacteria bacterium
ttctcttagcgatatgcgtggtcttacctcgcattgccgggcgatgcgccaggtatctttgattgtgtgcactgcagcgccgatttctcgcaaaatcgtcgtctttggtcgctccacaatcgctcctcaaagacgccaatttcgcaagaaatcggccgctctaagtaagagaca

SEQ ID NO: 17249 - RNA, 174 nt, unidentified
  source 1..174: mol_type = other RNA; note = Related to FNEQ01000013.1; note = Duganella sp.
tcaattacgcgttttgatggtcaaattcacttggtcattaatgtcgggcgtttcgccagactgatgagattgttagcactgacagcgcagaaagccgcacgcagcccggactgcaacctctcggttttgccgtgccgcgtacgtcttcctgcgctgtgttcaatggtagttgag

SEQ ID NO: 17250 - RNA, 176 nt, unidentified
  source 1..176: mol_type = other RNA; note = Related to NZ_WWCJ01000015.1; note = Massilia guangdongensis
tcaattacgcgtttgatgatcgctaatattgcttgatcattaatgtcgggcgtttcgccagactgtcttgattgtttgcactggcagcgcagaaagccgcgcccggcccggactgcgggctggcgcccttgccgtcccgtgcacgtcttcctgcgctgttttcaatggtagttgag

SEQ ID NO: 17251 - RNA, 157 nt, unidentified
  source 1..157: mol_type = other RNA; note = Related to JABXFH010000020.1; note = Janthinobacterium sp.
tcaattacgcgttttgatggtcatttttcttggtcattaatgtcgggcgtttcgccagactgattagattgttagcattgacagcgcagaaagccgcacgcggcacggcgcgccgtaccgcgcacgcctttctgcgctgtgtttaatggtagttgag

SEQ ID NO: 17252 - RNA, 180 nt, unidentified
  source 1..180: mol_type = other RNA; note = Related to AHJE01000051.1; note = Cupriavidus basilensis
tcaattacgcgttttggtggtcattgactaaccttcgatgatcattaatgtcgggcgtttcgccagactgttcgaattggcggcatttacagcgcagagaggcccacgcggcccggctgcgtacacttgtacttgccgcgccgcgcgggcctctctgcgccgtactccaaggtagttgag

SEQ ID NO: 17253 - RNA, 177 nt, unidentified
  source 1..177: mol_type = other RNA; note = Related to NZ_JACOGA010000020.1; note = Undibacterium flavidum
tcaattacgcgtttcgatggtcgtatatatctcttgatcattaatgtcgggcgtttcgccagaccgaatttaattgttagctttaacagcgtagaaacccccgagcgccgtgcccgcgtcgcgagctcctagtcccgtcgcccggtgatttctacgctgttataaatggtagttgag

SEQ ID NO: 17254 - RNA, 160 nt, unidentified
  source 1..160: mol_type = other RNA; note = Related to JABFMQ010000002.1; note = Herbaspirillum sp.
tcaattacgcgttttgatgttcaagcatatttctggacattaatgtcgggcggagcgccagactgaatgaattggtaccactgacagcgcagaaagccgcgcccgtcccggctcgccgcgacgaacacgccttcctgcgctgtaatttatggtagttgag

SEQ ID NO: 17255 - RNA, 186 nt, unidentified
  source 1..186: mol_type = other RNA; note = Related to NZ_JABUXU010000010.1; note = Advenella sp.
ccaattacgcgtttcgttggctactgacattggtgtctgcaagctgataatgtcgggcgtatcgccagactgaaaaggattggcagcatttttggcgcaaagacggtcgcgcgtcccagctcctccgcatgtctgctcctccgccgggccacgcgaccgtcttcgcgccatatttaggtagttggt

SEQ ID NO: 17256 - RNA, 186 nt, unidentified
  source 1..186: mol_type = other RNA; note = Related to NZ_CP089848.1; note = Paralcaligenes sp.
ccaattacgcgtttcgttggctgctgactgaattgtctgtgagctgataatgtcgggcgtatcgccagactgaaaaggattggcagcatttttggcgcaaagacgctcacgcgtcccagctcctccgcatgaatgctcctccgccgggccacgcgaccatcttcgcgccatatttaggtagttggt

SEQ ID NO: 17257 - RNA, 171 nt, unidentified
  source 1..171: mol_type = other RNA; note = Related to QTOY01000016.1; note = Burkholderia stagnalis
tcaattacgcgttttgttgatctagcgttgtctggatcaataatgtcgggcgattcgccagactgtcgacgattggggacacttacggcgcagagcggcccgcgcggcccagccggggtgctcccgtccgggccgcgcggaccgctctgcgccaaatcaagggtagttgag

SEQ ID NO: 17258 - RNA, 176 nt, unidentified
  source 1..176: mol_type = other RNA; note = Related to CAKMAA020000066.1; note = Candidatus Nitrotoga sp. HW29
tcagttacgcgtattgtggttattagtttaattaataatccattgtcgggcgaatcgccagacagcaaatgattgtgtgacatcgacggcacgaagaaggccccgcgcccaatcggctccgttgtcactcgcttgggcccgtgaccttcttcgtgcctgtaatttaggtaactgag

SEQ ID NO: 17259 - RNA, 175 nt, unidentified
  source 1..175: mol_type = other RNA; note = Related to NZ_QYUN01000002.1; note = Noviherbaspirillum sp.
tcagttacgcgacttgtggttgttggtaaaacgacatgccatcgtcgggcgcatcgccagacggaaaatgattgaacgacattggcggcacgaaaacggccacgcgcccaatctgctcctttgtcgcatcttgggcgcgtgtccattttcgtgcctgtaattcaaggtagctgag

SEQ ID NO: 17260 - RNA, 183 nt, unidentified
  source 1..183: mol_type = other RNA; note = Related to NZ_CP031704.1; note = Solimonas sp.
tcagttacgcgtatctgtggttgttagtaatttaacgccattgtcgggcgtatcgccagacagtagttgattgagcgacatcgacggcacgaaggcgcaggcgcgcccaatctgtcccttcgctgtcgctcgtgttgattgggcgcgcctgcgccttcgtgcctgtagttcaaggtagctgag

SEQ ID NO: 17261 - RNA, 176 nt, unidentified
  source 1..176: mol_type = other RNA; note = Related to NZ_ARWF01000001.1; note = Methylotenera sp.
tcagttacgcgtattgtggttgttagtaatctaacgttaccattgttgggcgaatcgccagacagtaaatgattgagtgacatcggaggcacgaagaaggccgcgcgcccaaaccgctcctatgtcgctcctttgggcgcgcggccttcttcgtgcctgtaatttaggtagctgag

SEQ ID NO: 17262 - RNA, 168 nt, unidentified
  source 1..168: mol_type = other RNA; note = Related to JAGKSE010000017.1; note = Acidovorax sp.
tcagctacgcgtttgtggtgaaggtaactagccatcgtcgggcgatttgccagacggaaatagattgagtgacatcgacggcacgaaaccggccctgcggccactcgcgccaagtctgtcacgagtggccgcaggtccggtttcgtgcctgtaatcagggtatctgag

SEQ ID NO: 17263 - RNA, 149 nt, unidentified
  source 1..149: mol_type = other RNA; note = Related to JAGOGO010000002.1; note = Deltaproteobacteria bacterium
gctctttagaggataagcagtttttaggctttgtccggcgttccgctggacttttacggattgataacacttaccggcatggtggccttcctcggctcaccgtcggtaagccgaggaaggccaccatgcctgcctctaagtaaagagca

SEQ ID NO: 17264 - RNA, 165 nt, unidentified
  source 1..165: mol_type = other RNA; note = Related to JACRDD010000019.1; note = Desulfobacterales bacterium
gctctttagcgaaataaactaagttagattagttttgtctggcgcttcgccggacttgcacctattgatggcatttattggcgcggtaggccgctttggctcaccggcccgttccgcgccgataagccaaagcggcctaccgcgccgcgctctgagtgaagagct

SEQ ID NO: 17265 - RNA, 108 nt, unidentified
  source 1..108: mol_type = other RNA; note = Related to VRUF01000040.1; note = Planctomycetes bacterium
gctctttagcgaagtaagcaagtaagtcgctttgtctggcgttccgtccggacttacacgaattggtaacacttatcggcacgcaggcctccatctaggtaaagagtt

SEQ ID NO: 17266 - RNA, 169 nt, unidentified
  source 1..169: mol_type = other RNA; note = Related to PHBJ01000028.1; note = Deltaproteobacteria bacterium HGW-Deltaproteobacteria-13
gctctttagtgtactaagcattattaattaggctttgtcgggcgcttcgccagactttcacgaattgcttccgtttatcggtatgggatgcccgctgcggctcaccgaatataccgatattcggcaagccgcagcgggcatcccatacctcgctcaaaagtaaagagta

SEQ ID NO: 17267 - RNA, 155 nt, unidentified
  source 1..155: mol_type = other RNA; note = Related to VGGK01000004.1; note = Chlorobi bacterium
gctctttagtgttataagctgttgtatcttttggctttgtccggcgcttcgccagacttttaactattgctagcatttaccggcacgtgagaccgctttggctcaccgctggtaacccaaagcggtctcacgtgccgttttttaagtaaagagca

SEQ ID NO: 17268 - RNA, 178 nt, unidentified
  source 1..178: mol_type = other RNA; note = Related to NZ_LT907975.1; note = Pseudodesulfovibrio profundus
gctctttagcggaattgtcggtcaattgccgaaaggtttaagccgtcgtgtcgggcgctccgccagaccaattgttattgtgagcatttagcggcaaataaggacgcgcttttctcctccgtcgctagctcctacgtagaaaagcgcggccttatttgcctcgctcaagtaaagggca

SEQ ID NO: 17269 - RNA, 151 nt, unidentified
  source 1..151: mol_type = other RNA; note = Related to MEKZ01000132.1; note = Acidobacteria bacterium RIFCSPLOWO2_12_FULL_60_22
ctctttacgcggttgagactttcgggtctcagcgtccggcgattcgccggacccagtattgattggtaactcttatcggcacgggtcgagaaaatctcgacaagcgtgtcgagattttctcgacacgtgccttcgctcaaaggtaaagagc

SEQ ID NO: 17270 - RNA, 171 nt, unidentified
  source 1..171: mol_type = other RNA; note = Related to FUZY01000002.1; note = Burkholderia sp.
tcaattacgcgcggtagcagattctgtaccttgctatcaattgtcgggcgcttcgccagactgagctgcagtggattcttcaacggcacgaaaacggcctgcgccgaatccgtgtccagtgggtcccgattcggcgcaggccgttttcgtgcctaaattcaggtaattgat

SEQ ID NO: 17271 - RNA, 167 nt, unidentified
  source 1..167: mol_type = other RNA; note = Related to NZ_LMEK01000025.1; note = Variovorax sp.
tcaattacgcgtatcggtagcaggagctagctatcaatgtcgggcgcttcgccagactgaaatgcagtggactacaacaacggcacgaaatcggcatgcgccgaatccgtgtccggtaggtcccgattcggcgcatgccgctttcgtgcctaatttaggtaattgaa

SEQ ID NO: 17272 - RNA, 166 nt, unidentified
  source 1..166: mol_type = other RNA; note = Related to JAIZPW010000002.1; note = Burkholderia contaminans
tcaattacgcgcggtagcagatatttcgctatcaattgtcgggcgtttcgccagactgagctgcagtggactatattaacggcacgaaaccggcatgcgccgaatccgtgtccagtaggtcccgattcggcgcatgccggtttcgtgcctaatttaggtaattgac

SEQ ID NO: 17273 - RNA, 169 nt, unidentified
  source 1..169: mol_type = other RNA; note = Related to NZ_CADFAD010000001.1; note = Burkholderia gladioli
tcaattacgcgcggtagcagacattttttgctatcaattgtcgggcgtttcgccagactgagctgtagtggacttcaataacggcacgaaagcggcatgcgccgaatccgtgtccggtgggtcccgattcggcgcatgccgctttcgtgcctatcttcaggtaattgac

SEQ ID NO: 17274 - RNA, 136 nt, Alcaligenes faecalis
  source 1..136: mol_type = other RNA; note = Related to DOIE01000002.1
acaattacgcgcggtaacaagttgctttgttatcaattgtcgggcgtttcgccagactgagctgtagtggattacatcttcggcacgaaaaaggcataggcctatgcctttttcgtgcctaatttaggtaattgac

SEQ ID NO: 17275 - RNA, 169 nt, unidentified
  source 1..169: mol_type = other RNA; note = Related to CP063848.1; note = Massilia sp.
tcaattacgcgaacggtagcaggtaataatagctatcaatgtcgggcgtttcgccagactgagaacaggtgggataccaaccacgacacgaaagcggcccgcgccaaatccgtgtccggtaggtcccgattcggcgcgagccgctttcgtgtctatttaggtaattgag

SEQ ID NO: 17276 - RNA, 170 nt, unidentified
  source 1..170: mol_type = other RNA; note = Related to NZ_WWCS01000001.1; note = Duganella margarita
tcaattacgcgaacggtagcagttggttatagctatcaatgtcgggcgcttcgccagactgagaacaggtgggaaaccaatcacgacacgaaagcggctcgcgccaaatccgtgtccggtaggtcccgattcggcgcgagccgctttcgtgtctattttaggtaattgag

SEQ ID NO: 17277 - RNA, 170 nt, unidentified
  source 1..170: mol_type = other RNA; note = Related to WNKY01000030.1; note = Duganella radicis
tcaattacgcgaacggtagcttagatgtagggctatcaatgtcgggcgtttcgccagactgagtacaggtgggatatcaatcacgacacgaaagcggcttgcgccaaatccgtgtccggtaggtcccgattcggcgcaagccgctttcgtgtctatattaggtaattgag

SEQ ID NO: 17278 - RNA, 166 nt, unidentified
  source 1..166: mol_type = other RNA; note = Related to PEFN01000001.1; note = Janthinobacterium sp.
tcaattacgtgagcggtagcaaaaaaggctatcaatgtcgggcgcatcgccagactgagtacaggtgggacatcaatcacgacacgaagacggcttacgccaaatccgtgtccggtgggtcccgattcggcgtaagccgtcttcgtgtctattcaaggtaattgat

SEQ ID NO: 17279 - RNA, 167 nt, unidentified
  source 1..167: mol_type = other RNA; note = Related to JACPYR010000019.1; note = Nitrosomonadales bacterium
tcaattacgtgtagacggtagcttattcttgttggctatcaattgtcgggcgcttcgccagactgggttgcagtggattcatctacagcacgaaatcgaaaattttcgtttcgtgctatgcccgaatcgaaaattttcgatttcgtgcttaattcaaggtaattgat

SEQ ID NO: 17280 - RNA, 167 nt, unidentified
  source 1..167: mol_type = other RNA; note = Related to MGWP01000046.1; note = Gallionellales bacterium GWA2_55_18
tcaattacgtgtagacggtagctcatttcgttggctatcaattgtcgggcgtttcgccagactgggttgcagtgtagtgtatcaacggcacgaaatcgcaatttttagtttcgtgctgcgcccgaatcgaaaaatttcgatttcgtgcctaattcaaggtaattgat

SEQ ID NO: 17281 - RNA, 175 nt, unidentified
  source 1..175: mol_type = other RNA; note = Related to NZ_JQKP01000004.1; note = Ferriphaselus sp.
tcaattacgtgaatggtggcaagttgtttcagctatcaattgtcgggcgtttcgccagactgagttgcagtggagtgcatcaacggcacgaaatcgaaagttttcgattcgggctagatgcagaagcgcccgaatcgaaaactttcgatttcgtgcctaatttaaggtaattgat

SEQ ID NO: 17282 - RNA, 166 nt, unidentified
  source 1..166: mol_type = other RNA; note = Related to NZ_ARWC01000001.1; note = Methylotenera sp.
tcaattacgcgaaggtggcttttgtattggctatcaatgtcgggcgtttcgctagactgaattgcagtggattataatttacagcacgaatccaaaatttttgtatcgtgcaaaatgcagcccaatccaaaaattttggattcgtgcttaatttaaggtaattgaa

SEQ ID NO: 17283 - RNA, 167 nt, unidentified
  source 1..167: mol_type = other RNA; note = Related to SSDX01000104.1; note = Rhodocyclaceae bacterium
tcaattacgcgttggatagcttggtttgaggctatcaattgtcgggcgtttcgccagactgagtttgagtggacttcatctacggcacgaaatcggcctggccgaattcgcgccgttggctccgaattcggccaggccgatttcgtgcctagttcaaggtaattgat

SEQ ID NO: 17284 - RNA, 166 nt, unidentified
  source 1..166: mol_type = other RNA; note = Related to NZ_CP073754.1; note = Methylomonas paludis
tcaattacgcgttgatagttcttccaaataagactatctgtgtcgggcgattcgccagaccgtacttaagtgggacaccatctacgtcatgaattcggcctcgccgaactcgtgcggtggctcaatttcggcgaggccgaattcatgactatttaaggtaattgat

SEQ ID NO: 17285 - RNA, 138 nt, unidentified
  source 1..138: mol_type = other RNA; note = Related to NZ_NWMV01000032.1; note = Macromonas sp.
tcaattacgcgtttggtagcagtcaaagtaaggcgctatctgagtcgggcgattcgctagaccgcaatgaggtgtacgtcatcaacgacacggaaacggccccggggccgtttccgtgtctattcaaaggtaattgac

SEQ ID NO: 17286 - RNA, 170 nt, unidentified
  source 1..170: mol_type = other RNA; note = Related to NZ_CP009962.1; note = Collimonas arenae
ctgtctacgcgtgatagcgcacccagctattaatgtcgggcgattcgccagactgtactgtattgagcagatttgacggcacggaattggcccaaaacccactccgcttccgcttcgcttctgctccatgggttttgggccaattccgtgcctaggtcaaggtagatact

SEQ ID NO: 17287 - RNA, 164 nt, unidentified
  source 1..164: mol_type = other RNA; note = Related to NIQA01000002.1; note = Pusillimonas sp.
tcaattacgcgtaggtagcctcaactacagggctatcaatgtcgggcgattcgccagactgtattgcagtggatatattttacgaggcaaaaccggcttggccggagagcctcgacactcggctctccggccaagccggttttgcctctatcaaggtaattgaa

SEQ ID NO: 17288 - RNA, 176 nt, unidentified
  source 1..176: mol_type = other RNA; note = Related to NZ_OU745373.1; note = Cardiobacterium sp.
ctaattacgcgttatttgatgactttgttttaaataatttagtcatctatgtcgggcgcatcgctagactgaatattaattgtgtcatttgtggcgagtttggaaagaaaattccgagctgtcataaatgacaactcggaattttctttccaaactcgctaattatggtagttagt

SEQ ID NO: 17289 - RNA, 156 nt, unidentified
  source 1..156: mol_type = other RNA; note = Related to CP005967.1; note = Haemophilus influenzae
ctaattacgcgttttggtagaaaattctatctattgtcgggcgaatcgccagactgaatattaattgtttccaattgtggcgagataaaggaaaaatttccgcccgcctcgctacacggaaatttttcctttatctcgctcatttaggtagttagt

SEQ ID NO: 17290 - RNA, 172 nt, unidentified
  source 1..172: mol_type = other RNA; note = Related to LUAO01000054.1; note = Neisseria sp.
ctaattacgcgtttttggatgattgaatttaaatttagtcgttcatagtcaggcgtttcgctagactgaatattaattgactacatctccgcgagaattcgggctttctcccgccttctcgttagagaagtcgggagaaagcccgaattctcgcttaatttaggtagttagc

SEQ ID NO: 17291 - RNA, 168 nt, unidentified
  source 1..168: mol_type = other RNA; note = Related to NZ_LXSJ01000026.1; note = Eikenella corrodens
taatctacgcgaatatgatggtctgtaataagatatgatttttatggttcatcaattgtcaggcgtaatcgctagactgaatctgaattgattccgatctcggcgggaaatatttccattttcctgctgggaaaatggaaatatttcccgctaatttaggtagttagt

SEQ ID NO: 17292 - RNA, 140 nt, unidentified
  source 1..140: mol_type = other RNA; note = Related to NZ_LPEB01000197.1; note = Burkholderia ubonensis
tcaattacgcgatcggtagccaacagctatcaatgtccggcgtttcgcaggactgcgcttgggtggacggcgtcaacggcacgaattccgtgtccggcgagccggacacggaattcgtgcctaacttcaaggtaattgag

SEQ ID NO: 17293 - RNA, 140 nt, unidentified
  source 1..140: mol_type = other RNA; note = Related to CABVPW010000018.1; note = Burkholderia lata
tcaattacgcgatcggtagcaaacggctatcaatgtccggcgtttcgcaggactgcgcttgggtggacggcgtcaacggcacgaagtacagggccggcgagccgtccctgtacttcgtgcctaaattcaaggtaattgag

SEQ ID NO: 17294 - RNA, 140 nt, unidentified
  source 1..140: mol_type = other RNA; note = Related to NZ_JAELTS010000025.1; note = Paraburkholderia sp.
tcaattacgcgatcggtagccaacagctatcaatgtccggcgtttcgcaggactgcgcttgggtggacggcgtcaacggcacgaagtacagggccgtcgagccggccctgtacttcgtgcctaaattcaaggtaattgag

SEQ ID NO: 17295 - RNA, 139 nt, unidentified
  source 1..139: mol_type = other RNA; note = Related to NZ_SNVI01000005.1; note = Paraburkholderia dipogonis
tcaattacgcgatgggtagctaagagctatcaatgtccggcgtttcgcaggactgcgtttgggtgggcgacatcaacggcacgaatttcgcgtccggcgagcggccacaaaatccgtgcctaacttcaaggtaattgag

SEQ ID NO: 17296 - RNA, 141 nt, unidentified
  source 1..141: mol_type = other RNA; note = Related to CP007783.1; note = Burkholderia cenocepacia
tcaattacgcgatcggtagcagtagctatcaattgtccggcgtttcgcaggactgcgtttgggtggacggcatcaacggcacgaagtacggtgtcggacgagccgacaccgtacttcgtgcctaaattcaaggtaattgag

SEQ ID NO: 17297 - RNA, 139 nt, Nitrosomonas sp.
  source 1..139: mol_type = other RNA; note = Related to QWIC01000028.1
tcaattacgcgattggtagttagcaactatctatgtccggtgtttcgcaggactgcgcttgagtggatggcatcatcggcacaaaatacaaggccgaaaagccgtccttgtattttgtgcctaatttaaggtaattgat

SEQ ID NO: 17298 - RNA, 141 nt, unidentified
  source 1..141: mol_type = other RNA; note = Related to CP001132.1; note = Acidithiobacillus ferrooxidans
ctcaattagcgtctgatagattcgtctatcaatgtccggcgtatcgcaggactgagttgagttgcacggcatctacggcacggagacccgtgccggcgagccgtcacgggtctccgtgcctacagtcaaaggtaattgaga

SEQ ID NO: 17299 - RNA, 158 nt, Chromobacterium sp.
  source 1..158: mol_type = other RNA; note = Related to NZ_MKCR01000001.1; note = Chromobacterium amazonense
tcaattacgcgtttggtagcttagctgcctcagcagtgtgcaagctatctattgtccggcgtttcgcaggactgagttgtggtggagggcatcaacgacacgaagatcggtgtcggacgagccgacaccgatcttcgtgtctattaaaggtaattgag

SEQ ID NO: 17300 - RNA, 146 nt, unidentified
  source 1..146: mol_type = other RNA; note = Related to CP045571.1; note = Acidithiobacillus thiooxidans
tcagctacgcgttttggtagtcaactgtagaactatcaactgtccggcgtttcgcaggactgcggtgtggtggatcgcaattacggctcgaaaagccgcgatggcgagccatcgcaacttttcgagtctagtttaaggtagttgag

SEQ ID NO: 17301 - RNA, 138 nt, unidentified
  source 1..138: mol_type = other RNA; note = Related to NZ_CP012371.1; note = Nitrosospira briensis
tcaattacgcgttttgataggtaatctatcaatgtcgggcgtttcgccagactgagctgtagtggagggcatcattggcacaaaatccggcgccggtgcccgtcaccgtatttcgcgcctagcttcaaggtaattgag

SEQ ID NO: 17302 - RNA, 139 nt, unidentified
  source 1..139: mol_type = other RNA; note = Related to JABFSF010000055.1; note = Methylotenera sp.
tcaattacgcgtttgatagattatttctatctatgtcgggcgtttcgctagactgagttgtagtggatggcatcattggcacaaaatacagtgctggcgagccatcactgtattttgtgccgatcttaaggtaattgat

SEQ ID NO: 17303 - RNA, 138 nt, unidentified
  source 1..138: mol_type = other RNA; note = Related to JACPOI010000036.1; note = Burkholderiales bacterium
tcaattacgcgttttggtagcttgtctatcaatgtccggcgcttcgcaggactgcgtataggtggagagcttcaacggcacgaaaaagtcgtccgcaagctccctttgtttttcgtgcctacgatcaaggtagttgag

SEQ ID NO: 17304 - RNA, 140 nt, unidentified
  source 1..140: mol_type = other RNA; note = Related to NZ_PVLR01000019.1; note = Malikia spinosa
tcaattacgcgaatggtagttttaagactatcaatgtccggcgtttcgcaggactgagctgtagtggatggcatcatcggcacggaatacgtggctggcgagccagccacgtattccgtgcctaattaaaggtaattgaa

SEQ ID NO: 17305 - RNA, 160 nt, unidentified
  source 1..160: mol_type = other RNA; note = Related to NZ_AP022673.1; note = Sphingomonas sp.
ccatttacgcgttaagcccctcgttggggtgtctggcgtttcgctggacgtaattcgattgccgagttttatcggtgcgaaagagggtgatgtctcatcgccttcggccgctacgctcgataagacatcaccctctttctcaccttcacaggtaaatggc

SEQ ID NO: 17306 - RNA, 161 nt, unidentified
  source 1..161: mol_type = other RNA; note = Related to NZ_CP016456.1; note = Sphingobium sp.
ccatttacgcgtatcgccctttttagggtgtgtctggtgtttcgctggacctaatttgattgccgagttttatcggtgcgaaagagggtgatgtctcatcgcctccggtcgctacgctcgataagacatcaccctctttctcaccttcacaggtaaatggt

SEQ ID NO: 17307 - RNA, 161 nt, unidentified
  source 1..161: mol_type = other RNA; note = Related to JADKHG010000002.1; note = Sphingomonadales bacterium
ccatttacgcgtttagtaccatttggtgctcgtccggcgtttcgctcgacgtcatttgattgtgcagttttatcgttgcgactgagtgcgatgtctcatcgcctcacggacgctacgctcgataagacatcgcactcagtcgcaacttctaggtaaatggc

SEQ ID NO: 17308 - RNA, 170 nt, unidentified
  source 1..170: mol_type = other RNA; note = Related to APMP01000001.1; note = Caulobacter vibrioides
ccatttacgcgttctagcgttcctgtcggaacgtgagtctggcgcttcgccggacttaaattgattgtagactcttatcggtgcggaagagggttatgtctcatcgcctcgatgaggccgctacgctcgataagacataaccctcttcctcaccttcacaggtaagtggc

SEQ ID NO: 17309 - RNA, 169 nt, unidentified
  source 1..169: mol_type = other RNA; note = Related to JADPJG010000026.1; note = Bradyrhizobium sp.
ccacctacgcgttggtctttcctttccgaagggaagatagtcgggcgtttcgccggacttagtttgattgcgcagtcttatcggtgcggaagagggagatgtctcatcgccttcggacgctacgctcgataagacatctccctcttcctcacctttaagggtaagtggc

SEQ ID NO: 17310 - RNA, 173 nt, unidentified
  source 1..173: mol_type = other RNA; note = Related to JAFWCE010000141.1; note = Loktanella sp.
ccacctacgcgaaaaggcgttaaaatgacttttacgcctgtcaggcgtttcgccagacatattttgattgactacatttatcggtgcggaagacggctagaactcatcgtctgttccagaccgctacgctcgataagttctacccgtcttcctcacctgagaaggtaagtggt

SEQ ID NO: 17311 - RNA, 175 nt, unidentified
  source 1..175: mol_type = other RNA; note = Related to NZ_PHSI01000091.1; note = Cereibacter azotoformans
ccacatacgcgagtcggcgcatgaaacagagtgattgcgctcgtctggcgtttcgccggacgtaaactgattgttgggatttatcggtgcggaatacgatgaggactcatcgcctctgcgaggccgctacgctcgataagtcctcatcgcattcctcaccttcaaggtaagtggc

SEQ ID NO: 17312 - RNA, 172 nt, unidentified
  source 1..172: mol_type = other RNA; note = Related to NZ_CP039435.1; note = Brevundimonas sp.
acacttacgtgattagcactcgttgtgcttggtccagcgctatcgctgagatctaagttgattggcaggttttatgggccacggaagatcgcgccatttccgcgtcattcgtgttctcatgtccgctgcgctcgcggaaatggcgcgatcttccgtgtcctaggtaagtgtt

SEQ ID NO: 17313 - RNA, 160 nt, unidentified
  source 1..160: mol_type = other RNA; note = Related to NZ_JAKRET010000004.1; note = Sphingomonas sp.
tcgcttacgcgaacagaccgttttacggttggtccggtgtttcgctggatcgtacattattggtcaaatctgggtgccccagacggacgaagcattcgtccgcctgtgggccactccgttcggtcgaatgcttcgtccgtctggggcttaggtaagcaaa

SEQ ID NO: 17314 - RNA, 160 nt, unidentified
  source 1..160: mol_type = other RNA; note = Related to JALHLF010000113.1; note = Novosphingobium sp.
aagcttacgcgaaatggctgtgaaacagctggtctggtgcttcgccggatctcaaatgattggtaacttttaggtgctccgaacgggcgatggtttcgaccgccttacggacgctccgctcggtcgaaaccatcgcccgttcggagcttaggtaagcaat

SEQ ID NO: 17315 - RNA, 161 nt, unidentified
  source 1..161: mol_type = other RNA; note = Related to NZ_WMHO01000038.1; note = Sandarakinorhabdus rubra
atgcttacgcgagtaggccattaaattggctggtctggtgtttcgccagatcgaaatcgattggtaagttttatcggccccgaacggacgaagtactcggccgcccaggggccgctccgctcggccgagtacttcgtccgttcggggcttaggtaagcagc

SEQ ID NO: 17316 - RNA, 163 nt, unidentified
  source 1..163: mol_type = other RNA; note = Related to NZ_JACIJH010000001.1; note = Sphingopyxis panaciterrulae
gagcttacgcgattaagtgccggagacggtactttgtctggcgcttcgccagatatcacgtaattggtcaattctatgggccccgaacggacgaaggattcgtccgccaaaggccgctccgctcgtacgaatccttcgtccgttcggggcttaggtaagcaac

SEQ ID NO: 17317 - RNA, 189 nt, unidentified
  source 1..189: mol_type = other RNA; note = Related to DPST01000077.1; note = Erythrobacter sp.
aagcttacgcgactaggcgttggcaacaacgctgagtctggcggatcgccggacttcatttgattggttggattttggtgcccccgaatgggcgtgatggatcannnnnnnnnnnnnnnnnnnnnnnnnnnnnnnnnnnnnnnnnngggcgatgatccatcacgcccattcggggcttaggtaagtgac

SEQ ID NO: 17318 - RNA, 168 nt, unidentified
  source 1..168: mol_type = other RNA; note = Related to JABFWP010000009.1; note = Sphingomonas sp.
aagcttacgcgaatgagcaccgtaactggtgcttggtcgggcgtttcgccagacctcacattattgacctcaattaggggccccgaaagcccgcgatttcccatcgccccttcggggacgctccgctcgaatgggccctcacgctctttcggggcataggtaagcaga

SEQ ID NO: 17319 - RNA, 163 nt, unidentified
  source 1..163: mol_type = other RNA; note = Related to JADCAE010000108.1; note = Phenylobacterium sp.
ccacttacgcgttaagcgctctcgggtgcttggtccggcgcttcgccggatctcaatggtctgggaacatttattgccccgaaagagggcggtagatgatcgcctcccggccgctccgctcgatcacccaccgccctctttcgggtctcttgaggtaagtcag

SEQ ID NO: 17320 - RNA, 167 nt, unidentified
  source 1..167: mol_type = other RNA; note = Related to JAGRQC010000004.1; note = Sphingomonadaceae bacterium LXI357
cagcttacgcgacttggtgtcacgtttggatacccgtctggcggttcgccggacgtcacattattgggaatgcttggggctccgaaagagcgcgatggccaatcgccctcagtcgggacgctccgctcgattgcccatcgcgctctttcggagcataggtaagctgt

SEQ ID NO: 17321 - RNA, 168 nt, unidentified
  source 1..168: mol_type = other RNA; note = Related to NZ_CP054151.1; note = Agrobacterium vaccinii
tggcttacgtgtattgagtgcattgtctagcacttggtctagcgcttcgctggacctcattatattgcggaattttggtgccctgtaaggtagtgattgaacatcgcccttcgggacgctccgctcgataatcaatccctaccttacagggcttcaagggtaagctat

SEQ ID NO: 17322 - RNA, 168 nt, unidentified
  source 1..168: mol_type = other RNA; note = Related to FTMQ01000001.1; note = Rhizobium sp.
cggcttacgtgtattgagtgcgtcgtttagcacttggtctagcgcttcgctggacctcattatattgcggaattttggtgccctgtaaggtagcgattgaacatcgcccttcgggacgctccgctcgatagtcaatccctaccttacagggctttaagggtaagctat

SEQ ID NO: 17323 - RNA, 167 nt, unidentified
  source 1..167: mol_type = other RNA; note = Related to NZ_JACHEG010000009.1; note = Rhizobium wenxiniae
aggcttacgtgtcttgagtgcatattagcacttggtctagcgtttcgtctggacctcatcatattgcggaattttggtgccctgtaaggtagcgattgaacatcgcccttcgggacgctccgctcgataatcaatccctaccttacagggctttaagggtaagctat

SEQ ID NO: 17324 - RNA, 164 nt, unidentified
  source 1..164: mol_type = other RNA; note = Related to NZ_NWSV01000001.1; note = Rhizobium chutanense
acgcttacgtgcataagcgcttcgtgcgctggtctggcgattcgtccggacctcattatattgtcgagatttggtgccctagaaggtagcgattgccaatcgcccttcgggacgctccgctcgatagccattcactaccttctagggctttaaaggtaagcata

SEQ ID NO: 17325 - RNA, 164 nt, unidentified
  source 1..164: mol_type = other RNA; note = Related to NZ_JADNQW010000005.1; note = Methylosinus sp.
atgcttacgcgtaacgtgccgtcaggcacgtggcccggcgcttcgctaggtctaactttattgtcctcacttgcggcctcggaagacggctttgcgccatcgtccgtgggaccgctccgctcgatggcgcaaagccgtcttccgagtccttaaaggtaagcact

SEQ ID NO: 17326 - RNA, 162 nt, unidentified
  source 1..162: mol_type = other RNA; note = Related to NZ_JAEPIV010000062.1; note = Azospirillum sp.
atgcttacgcgtaaagtgccgaaaggcacttggccaggcgtttcgcccggtctaattttattgtccccacttgcggcctcggaagatggctttgggccatcgtcgaggaccgctccgctcgatggcccaaagccatcttccgagtccttaaaggtaagcaat

SEQ ID NO: 17327 - RNA, 167 nt, unidentified
  source 1..167: mol_type = other RNA; note = Related to NZ_VSTH01000095.1; note = Bradyrhizobium hipponense
acgcttacgcgaatgagcacatgctttcgtgcttggtcgggcgtttcgccagacctcatcttattgtcgagttttgttgccccggaagatagcaactcgctatcgcccttcgggacgctccgctcgatatcaagtcactatcttccgcggcttcaaaggtaagcttt

SEQ ID NO: 17328 - RNA, 168 nt, unidentified
  source 1..168: mol_type = other RNA; note = Related to RXJE01000056.1; note = Bradyrhizobiaceae bacterium
aggcttacgcgtttgagcactactaatgtgcttggtctggtgccttcgctggacctcaacttattgtcgacttttgggcgccccaaacgatagcgccacgctatcgcccaaggggacgctccgctcgatagcatgtcactatcgtttggggcttttagggtaagcagc

SEQ ID NO: 17329 - RNA, 160 nt, unidentified
  source 1..160: mol_type = other RNA; note = Related to NC_015976.1; note = Sphingobium sp.
gcgcttacgcggtaagcacttcggtgcttggtctggcgtttcgccagacatcattatattggctagttttttggccccacaagagagcgctgcgcgctcgcccatggggccgctccgctcgaacgcacagcgctctcttgtggggcttggggtaagcatt

SEQ ID NO: 17330 - RNA, 167 nt, unidentified
  source 1..167: mol_type = other RNA; note = Related to NZ_CP039695.1; note = Novosphingobium sp.
cagcttacgcgttttgggtgcctaacggcatctagtccgacgtttcgtttggacttcaaattattggtcacacttgtggctccggaagagtccgatacgagatcggctcttgcagagccgctccgctcgatctcgtatcggactcttccggagcataggtaagctat

SEQ ID NO: 17331 - RNA, 156 nt, unidentified
  source 1..156: mol_type = other RNA; note = Related to JAFVHE010000060.1; note = Sphingopyxis sp.
cagcttacgcgattagtgcttttgcgctggttcggcgcttcgccgaatctcaatttattgttcccatttggggccctgaaagagagcgatgcaaaatcgccacaggacgctccgctcgattttgcatcgctctcttccagggcctaggtaagctga

SEQ ID NO: 17332 - RNA, 160 nt, unidentified
  source 1..160: mol_type = other RNA; note = Related to NZ_CP011310.1; note = Aurantiacibacter atlanticus
ccgcttacgcgttaagcatcctcggatgcttggttcggcgctgcgccgaatctcatatcattggaaccaattggggctccgaaagagagcgatgcgaaatcgccttacggacgttccactcgattccgcatcgctctctttcggagcttaggtaagcaat

SEQ ID NO: 17333 - RNA, 167 nt, unidentified
  source 1..167: mol_type = other RNA; note = Related to NZ_CP092689.1; note = Gluconobacter frateurii
gtgcttacgcgtatggtgaaactaccaagcctcaccgtctggcgcttcgccagagttcatatgattgcccagttttcattgccggggagagaacttaggtctcatcgaccacaggctcgctccgctcaatgagacctaagttctctccccggctcaaggtaagcaat

SEQ ID NO: 17334 - RNA, 167 nt, unidentified
  source 1..167: mol_type = other RNA; note = Related to NZ_JAERLO010000011.1; note = Gluconobacter cerinus
gtgcttacgcgtatggtgaaaacactaaacttcgccgtccggcgcttcgccggacttcatatgattgttgggttattgttgccgtggagagaacttaggtcttatcgtcctaggggctcgcgctgctcgataagacctaagttctctccccggctcaggtaagcaat

SEQ ID NO: 17335 - RNA, 161 nt, unidentified
  source 1..161: mol_type = other RNA; note = Related to NZ_CP068419.1; note = Gluconobacter sphaericus
atgcttacgcgtatggtgaaaaaccaattcgccgtctggcgtttcgccggacttcaaatcattggtaggtttctttgccgaggacgaactgtaggtctcaccgaccttcggtcgctccgctcggtgagacctacagttcgtcctcggcttaggtaagcaat

SEQ ID NO: 17336 - RNA, 169 nt, unidentified
  source 1..169: mol_type = other RNA; note = Related to JAEULJ010000003.1; note = Altererythrobacter sp.
gcgcttacgcggttgagcatcttttgctcggtccggcgtttcgtccggacctcatatgattggctggttttatggcaccgaaagacagcgctgcgctgtttgccggtcgcttcgaccggccgctacgctaaacagcgcagcgctgtctttcggtgcttaggtaagctcc

SEQ ID NO: 17337 - RNA, 164 nt, unidentified
  source 1..164: mol_type = other RNA; note = Related to NZ_JAINWL010000001.1; note = Proposed Citromicrobium bathyomarinum
ctgcttacgcgattgagcaatggcctgctcggtctggcgcttcgccggacctcactagattggccggttttatggcaccgaaagacagcagcgcgctgtctcccggcaagccggtcgctccgctagacagcgcgctgctgtctttcggtgcttaggtaagccct

SEQ ID NO: 17338 - RNA, 168 nt, unidentified
  source 1..168: mol_type = other RNA; note = Related to QFOF01000021.1; note = Azospirillum brasilense
tcacttacgcgattggcactgtgtgaatgcattagtgctggtctggtgtttcgccggacctcattggattgataggttttacccggcgcggaagggagcggtgtcttaccgcctccggccgctccgctcggtaagacaccgctcccttccgcgcctcaggtaagtgat

SEQ ID NO: 17339 - RNA, 170 nt, unidentified
  source 1..170: mol_type = other RNA; note = Related to NZ_MLCO01000142.1; note = Roseomonas deserti
tcacctacgagagtggcactaaactatgaaacttagtgctggtctggcgcttcgccggatctcatttgattggcggcttttcccgggcgcggaaggacgcggtgtcttaccgtcctccggccgctccgctcggtaagacaccgcgtccttccgcgcctttggtaggtgtt

SEQ ID NO: 17340 - RNA, 160 nt, unidentified
  source 1..160: mol_type = other RNA; note = Related to JACKJE010000004.1; note = Methylobacteriaceae bacterium
ccgcttacgcgtatgcgccgaaaggcgcatggcccggtgtttcgctaggtctaagtttattgcggagttctgcggactcggaagatggcgacagcccatcgcccggggacgctccgctcgatggtctgtcgccatcttccgagtctcaaaggtaagcgct

SEQ ID NO: 17341 - RNA, 164 nt, unidentified
  source 1..164: mol_type = other RNA; note = Related to NZ_CP088280.1; note = Bradyrhizobium sp.
caacttacgcgataagcaccttgtgtgcttggtccgacgtttcgtcagacctcaattgattgctaggttttatccggtgtggaagaacgcgtggtcttaccgccacaagtggccgctccgctcggtaagaccccaccttcttccacacctccaaaggtaagtga

SEQ ID NO: 17342 - RNA, 165 nt, unidentified
  source 1..165: mol_type = other RNA; note = Related to JAFKKC010000005.1; note = Hyphomicrobiales bacterium
tagcttacgcgagaagcaccttgtgtgcttggtccgacgtttcgtcagacatcagtttattgattggttttatccggtgtggaagaacgtgtggtcttaccgccacaagtggcctctccgctcggtaagaccccacgttcttccacacctccaagggtaagtgat

SEQ ID NO: 17343 - RNA, 165 nt, unidentified
  source 1..165: mol_type = other RNA; note = Related to RJJT01000004.1; note = Rhizobium pisi
caccttacgcgagaagcaccttgtgtgcttggtccgacgtttcgtcagacctcaattgattggcaggttttatccggtgcggaagaacgcgtggtcctaccgccacaggtggccgctccgctcggtaaaaccccaccttcttccacacctccaagggtaaggtga

SEQ ID NO: 17344 - RNA, 165 nt, unidentified
  source 1..165: mol_type = other RNA; note = Related to NZ_FODE01000022.1; note = Paracoccus alcaliphilus
tagcttacgcgataagcaccttgcgtgcttggtcagacgtttcgtcagacctcaattgattgttaggttttatccggtgtgggtgcacgtgtggtcttaccgccacaagtggcctctccgctcggtaagaccacacgtacacccacaccttcgagggtaagtgat

SEQ ID NO: 17345 - RNA, 165 nt, unidentified
  source 1..165: mol_type = other RNA; note = Related to SRUN01000004.1; note = Mesorhizobium sp.
cagcttacgcgaaaggcacctcgtgtgcttggtccgacgtttcgtcagacctcatctgattgtcgggttttatgcggtgtggaataacgcgtggttctaccgccacaagtggccgctccgctcggtaaaaccccaccttatcccacacctccaagggtaagtgat

SEQ ID NO: 17346 - RNA, 164 nt, unidentified
  source 1..164: mol_type = other RNA; note = Related to WUFV01000007.1; note = Rhizobium leguminosarum
cagcttacgcgagaagcatctttggtgcttggtccgacgtttcgtcagacatcaattgattgataggttttatccggtgtggaacaacgtggtgtcttaccgccacaagtggccgctccgctcggtaaaacaccacgttattccacacctccaagggtaagtga

SEQ ID NO: 17347 - RNA, 164 nt, unidentified
  source 1..164: mol_type = other RNA; note = Related to RPJK01000002.1; note = Sinorhizobium medicae
cagcttacgcgagaagcacctgcggtgcttggtccgacgtttcgtcagacctcaattgattgataggttttatccggtgtggaatatcatggtgtcttaccgccacaagtggccgctccgctcggtaaaaccccacgttattccacacctccaagggtaagtga

SEQ ID NO: 17348 - RNA, 165 nt, unidentified
  source 1..165: mol_type = other RNA; note = Related to NZ_KI912610.1; note = Mesorhizobium ciceri
tagcttacgcgaaaagcactttttgtgcttggtccgacgtttcgtcagacctcaattgattgataggttttatccggtgtggaacaacgtggtgtcttaccgccacaagtggccgctccgctcggtaaaactccacgttcttccacacctccaagggtaagtgat

SEQ ID NO: 17349 - RNA, 164 nt, unidentified
  source 1..164: mol_type = other RNA; note = Related to NZ_WOAC01000018.1; note = Mesorhizobium sp.
cagcttacgcgagaagcacagttcgtgcttggtccgacgctccgtcagacctcaattgattgctaggttttttccggtgtggaacaacgcggtgtcttaccgccttgataggacgctccgctcggtaaaacccctcgttcttccacacctccaagggtaagtga

SEQ ID NO: 17350 - RNA, 165 nt, unidentified
  source 1..165: mol_type = other RNA; note = Related to JAJAVB010000031.1; note = Aurantimonas sp.
tagcttacgtgaaaagcgccttgcgcgcttggtccggcgtttcgtcagacctcagtcgattgttaggttttatccggtgtggaacaacctggggttctaccgccacaagtggccgctccgctcggtagaaccccagcttattccacacctccaagggtaagtgct

SEQ ID NO: 17351 - RNA, 161 nt, unidentified
  source 1..161: mol_type = other RNA; note = Related to NZ_MKIN01000018.1; note = Rhizobium taibaishanense
tcacttacgcgaagagcagtttttctgcttggtcgggcgcttcgccggacctcataatattggtaactcttttgttgcgcggaaggtttcgacgtctcgtcgtcttcagaccgcttccgctcgacaagacgtcgaaaccttccacgtcttaggtaagtgct

SEQ ID NO: 17352 - RNA, 164 nt, unidentified
  source 1..164: mol_type = other RNA; note = Related to JALBGV010000046.1; note = Neorhizobium sp.
acacttacgcgaagagcagattttctgcttggtcgggcgtttcgccggacctcacatcactggtaactcttttgttgcgtggaaggtttcgacgtcttgtcgtcttcagaccgcttccgctcgacaagacgtcgaaaccttccacgtcttcaaaggtaagtgct

SEQ ID NO: 17353 - RNA, 164 nt, unidentified
  source 1..164: mol_type = other RNA; note = Related to NZ_LANJ01000022.1; note = Devosia epidermidihirudinis
attcttacgcgaacagcagatcttctgcttggtcgggcgcttcgccggacctcaactcactgttagctcttttgttgcgcggaaggtttcgacgccttgtcgtcttacgaccgcttccgctcgacaagacgtcgaaaccttccacgtctccagaggtaagtgct

SEQ ID NO: 17354 - RNA, 164 nt, unidentified
  source 1..164: mol_type = other RNA; note = Related to NZ_CP013068.1; note = Pannonibacter phragmitetus
acacttacgcgaagagcagaatttctgcttggtcgggcgcttcgccggacctcatatcattggtaactcttttgttgcgcggaaggtttcgacgtcttgtcgtcttcagaccgcatccgctcgacaagacgtcgaaaccttccacgtcttcaaaggtaagtgct

SEQ ID NO: 17355 - RNA, 158 nt, unidentified
  source 1..158: mol_type = other RNA; note = Related to VRUZ01000039.1; note = Methylobacterium sp.
gcacttacgcgaaaagcactccggtgcttggtctagcgattcgctggatctaattcgattgagcactctttcccggcgtgaaggctcgttgtgccttgccgccgaaggacgctccgctcgtcaagtcacaacgagccttcacgccttaggtaagtgtt

SEQ ID NO: 17356 - RNA, 165 nt, unidentified
  source 1..165: mol_type = other RNA; note = Related to NZNS01000009.1; note = Parvibaculum sp.
atgcttacgcgaatgacaccttgtaatctggtgttagtctggcggttcgccagacatcagttgattgtctactcttattgccgcggaagtccgcggggccccatcgcccttcgggacgctccgctcgataagaccccgcggacttccgcgtcttaggtaagcgac

SEQ ID NO: 17357 - RNA, 159 nt, unidentified
  source 1..159: mol_type = other RNA; note = Related to NZ_LWMO01000047.1; note = Rhizobium anhuiense
gcacttacgcgaatggcatgtagcttggtcaggcgcttcgctagacctcactcgattggtttcctttttgcggctcggaaggttccaaagccttcccgcctcgttgaggacgctccgctcggcaagactttgcaaccttccgagcctttggtaagtgat

SEQ ID NO: 17358 - RNA, 160 nt, unidentified
  source 1..160: mol_type = other RNA; note = Related to JACHZB010000001.1; note = Rhizobium sp.
gcacttacgcgaatggcattttagcttggtcgggcgtttcgctagacctcactcgattggtttcctttttgcggctcggaaggttccaaagccttaccgcctcaatgaggacgctccgctcggcaagactttgtaaccttccgagcctttggtaagtgat

SEQ ID NO: 17359 - RNA, 162 nt, unidentified
  source 1..162: mol_type = other RNA; note = Related to SGNZ01000005.1; note = Agrobacterium salinitolerans
gcacttacgcgaatggcaacatagcttggtcgggcgcttcgctagacctaactcaattggcgtcctttttgcggctcggaaggttctaaagccttaccgcctccgccagaggccgctccgctcggtaagactttagaaccttccgagcctttggtaagtgat

SEQ ID NO: 17360 - RNA, 162 nt, unidentified
  source 1..162: mol_type = other RNA; note = Related to NZ_FMAG01000002.1; note = Rhizobium multihospitium
acacttacgcgaatggcaatgtagcttggtcgggcgcttcgctagacctcactcaattggtgtcctttttgcggctcggaaggttccaaagccttaccgcctccgccagaggccgctccgctcggtaagactttggaaccttccgagcctttggtaagtgat

SEQ ID NO: 17361 - RNA, 162 nt, unidentified
  source 1..162: mol_type = other RNA; note = Related to JACVBP010000001.1; note = Ensifer sp.
ttacttacgcgatgggcactactgctcggtcgggcgcttcgctagacctcaatcgattgaccgcttttattcggctcggaaggatatgcgatccatccgtccgataaatcggtcgctccgctcggatagctcacatttccttccgagccttaggtaagtgat

SEQ ID NO: 17362 - RNA, 160 nt, unidentified
  source 1..160: mol_type = other RNA; note = Related to JACGXN010000001.1; note = Phyllobacterium myrsinacearum
tcacttacgcgaatggcatgaattgcttggtcgggcgcttcgctagacctcatttgattgaccgggattattcggctcagaagggtgtgaatccttttcgccttcttcggtcgctccgctctacaaggcttcacacccttctgagcctttggtaagtgat

SEQ ID NO: 17363 - RNA, 160 nt, unidentified
  source 1..160: mol_type = other RNA; note = Related to NZ_CP043489.1; note = Labrys sp.
tcacttacgcgattagctttagagcttggtctggtgtttcgctagacctcaatcgattgggcagttttattgggctcggaaggttcaaaagccttgcagacccaatggggccgctccgctcagcaaggcttttgaaccttccgagccattggtaagtgat

SEQ ID NO: 17364 - RNA, 170 nt, unidentified
  source 1..170: mol_type = other RNA; note = Related to NZ_CP073063.1; note = Brevundimonas diminuta
ccacttacgcgtatgggttgaaattctgtttcgactttaagtctggcgcttcgccggacatcagttgattggtcattttttgggtgccgtgcaagagaccgacatcttgtcgcctttggacgctccgctctttcagatgccgttctcttgcacggccttaggtaagtgat

SEQ ID NO: 17365 - RNA, 155 nt, unidentified
  source 1..155: mol_type = other RNA; note = Related to JAHCDM010000009.1; note = Roseococcus sp.
ttgattacgtgatggcactgcttgtgctttgtctggcgtttcgccagacatgactggattgtacacttctggccggcgcgggaggccgcggcgactcgccgcgagccgctccgctcggcaagtcgccgcggcctcccgcgcctttggtaattgaa

SEQ ID NO: 17366 - RNA, 152 nt, unidentified
  source 1..152: mol_type = other RNA; note = Related to NZ_JXMU01000014.1; note = Ahrensia marina
gtacttacgcgaatggcctctggccttgtctggtgcttcgccagactttctaaaattggacttttcttgggcggctccaaggagcgaaggaacttatccttcacgctccgctgtctaagttccttcgctccttggagccttaggtaagtgca

SEQ ID NO: 17367 - RNA, 162 nt, unidentified
  source 1..162: mol_type = other RNA; note = Related to FOBJ01000004.1; note = Variovorax sp.
gttcttacgcgctctacggatgggtcacgtagaaacagtcgggcgattcgccagactttcaatgattgagtgcatttaccgcggtgaaaccggcttcgggatctcctgcgggcactcggagaacccgaagccggtttcaccgcgcaatttaaggtaagagct

SEQ ID NO: 17368 - RNA, 161 nt, unidentified
  source 1..161: mol_type = other RNA; note = Related to JAFKGB010000002.1; note = Burkholderiales bacterium
gttcttacgcgctctacgaatgggttacgtagaatagtcgggcgattcgccagacttttaatgattgagtgcatttaccgcggtgaaaccggcttcgggttttcctgcgagcactcggaaaacccgaagccggtttcaccgcgcaatttaaggtaagaact

SEQ ID NO: 17369 - RNA, 162 nt, unidentified
  source 1..162: mol_type = other RNA; note = Related to NZ_NRRT01000126.1; note = Rubrivivax gelatinosus
gttcttacgcgttctacggatgggtcacgtagagacagtcgggcgattcgccagacttgcaatgattgagtgcatttaccgcggtgaaaccggcttcgggttctcctgcgggcactcggagaacccgaagccggtttcaccgcgcaatttaaggtaagaacc

SEQ ID NO: 17370 - RNA, 162 nt, unidentified
  source 1..162: mol_type = other RNA; note = Related to JAFLDL010000016.1; note = Candidatus Accumulibacter sp.
gttcttacgcgttctacggatgggtcacgtagagacagtcgggcgcttcgccagacttgcaatgattgagtgcatttaccgcggtgaaaccggcttcgggttcgcctgcgggcactcggagaacccgaagccggtttcaccgcacaatttaaggtaggaact

SEQ ID NO: 17371 - RNA, 163 nt, unidentified
  source 1..163: mol_type = other RNA; note = Related to FP475956.1; note = Thiomonas arsenitoxydans
gtccttacgcgcttctacgtttcgggttacgtagaaaatgtcgggcgtttcgccagactcgtattgattgggtgcatttaccgctgcgaaaccggattcgggttttcctgcgggcactcggaaaacccgaatccggtttcgcagcgcatttctggtaaggact

SEQ ID NO: 17372 - RNA, 161 nt, unidentified
  source 1..161: mol_type = other RNA; note = Related to WWER01000012.1; note = Pusillimonas sp.
gttcttacgcgtctctacgtcaagggttacgtggatatgtcgggcgcttcgccagacttgcaatgattgagtgcatttaagctgcgaaagcggctccgcgttttcctgcgggcactcgaaaaacccgaagccgctttcgcagcatcttaaaggtaagaacg

SEQ ID NO: 17373 - RNA, 169 nt, Achromobacter sp.
  source 1..169: mol_type = other RNA; note = Related to CYTI01000014.1; note = Achromobacter xylosoxidans
tgctttacgtgtttctacggttttgggttccgtaggatagtcgggcgcttcgccagacagtcaatgattgaccgggattaccgccgcaaaggccgttcgggttttactgcggtccggtaggtcctcgaaaaacccgaacggcctttgcggcgcactttgggtaaagcaa

SEQ ID NO: 17374 - RNA, 160 nt, unidentified
  source 1..160: mol_type = other RNA; note = Related to NZ_JAJEJQ010000001.1; note = Paraburkholderia sp.
gcctttacgcggttctacgacgggctccgtagaatagtcgggcggttcgccagactgacaatgattgatcgagattaccgccgcgaaaccggtttcgggttttcctgcgggcactcggaaaacccgaaaccggtttcgcggcgcactttaggtagggcaa

SEQ ID NO: 17375 - RNA, 160 nt, unidentified
  source 1..160: mol_type = other RNA; note = Related to NZ_UWYX01000002.1; note = Burkholderia gladioli
cgctttacgcgattctacgacgggctccgtagaatagtcgggcggttcgccagactgacaatgattgaccgagattaccgccgcgaagccgctttcgggttctcctgcgggcactcggaaaacccgaaagcggcttcgcggcgcactttaggtaaggcaa

SEQ ID NO: 17376 - RNA, 160 nt, unidentified
  source 1..160: mol_type = other RNA; note = Related to QTRZ01000002.1; note = Burkholderia cenocepacia
cgctttacgcggttctacgacgggctccgtagaatagtcgggcgaactgccagactgacaatgattgaccgagattaccgccgcgaacccgctttcgggttctcctgcgggccctcggaaaacccgaaagcgggttcgcggcgcactttaggtaaggcaa

SEQ ID NO: 17377 - RNA, 170 nt, unidentified
  source 1..170: mol_type = other RNA; note = Related to NZ_JOMH01000001.1; note = Polycyclovorans algicola
ttttctacgcattgggctgggagcgtaggagaattgtcgggcgtttcgccagacttacatcgattgactgggattattgccgcaaactaccgtcgggattccctgcggtctcggtgcctcggtcctcggaaatcccgccggtagtttgcggcacagatcaggtaaagaga

SEQ ID NO: 17378 - RNA, 156 nt, unidentified
  source 1..156: mol_type = other RNA; note = Related to JACVAP010000002.1; note = Xanthomonas sp.
gctttttagcggtctgcgtttgccgcgcagatagtctgacgcttcgtcggactgttgaaattgcgtgggattatcgccgtaaagccggtgcccggcttcgctgcgagccctcgcaaagccgggcaccggctttacggcgcatcaaagtaaaaagca

SEQ ID NO: 17379 - RNA, 171 nt, unidentified
  source 1..171: mol_type = other RNA; note = Related to PBYA01000036.1; note = Salinisphaera sp.
ctctttacgcgattccatgcgttgggtttgtggaatagtcgggcgattcgccagacagttatttattgaccgggtttatcaccgcgaaaacgcaggcgggtttccctgcgcttccggtaggttctcggaaaacccgcctgcgttttcgcggtgcaatttgaggtaaagggt

SEQ ID NO: 17380 - RNA, 170 nt, unidentified
  source 1..170: mol_type = other RNA; note = Related to JAIOAJ010000071.1; note = Stenotrophomonas maltophilia
ctcttcacgcgatgcgacatggagtcgacatggtctggcgttgcgccagacagctagggattgattgggtttatcgccccgcatagccggtacggtctcaccgttccggtccagtgggtcctcgcggtaagcccgtaccggctatacggggcgttttcttggtgaagaga

SEQ ID NO: 17381 - RNA, 170 nt, unidentified
  source 1..170: mol_type = other RNA; note = Related to JADUKR010000001.1; note = Stenotrophomonas maltophilia
ctctttacgcgatgtgacaggaagtcgatgtggtctggcgttgcgccagacagcaatgaattgaacgggattatcgccccgcacagccggcacggtctcaccgctccggtccagcgggtcctcgcggtaagcccgtgccggctgtgcggggcgttctcttggtgaagagc

SEQ ID NO: 17382 - RNA, 175 nt, unidentified
  source 1..175: mol_type = other RNA; note = Related to MIGM01000010.1; note = Xanthomonas arboricola
ctctttacgcgacgtgacatggaaagttaatggttaagtctggcgttgcgccagactgcaaagaattgattgggtttatcgccccgcatagccggctcggtctcaccgctccggtccagtgggtcctcacggtaagcccaatccggctatgcggggcgttctcttggtgaagagc

SEQ ID NO: 17383 - RNA, 185 nt, unidentified
  source 1..185: mol_type = other RNA; note = Related to NZ_JQNL01000001.1; note = Luteibacter sp.
ctctttacgcgaatggcaaggggaaatgccgaagctgttgactgtgtctggcgatgcgccggactgctaaggattgattgggattaccgccccgtgtagccggcttggtctcaccacctccggtccagtgggtcctcaatggtaagcccaagccggctacacggggcgtcttcatggtaaagagt

SEQ ID NO: 17384 - RNA, 180 nt, unidentified
  source 1..180: mol_type = other RNA; note = Related to NZ_CP093547.1; note = Lysobacter gummosus
ctctttacgcgacggcaatggaatgccacgaattgtgaaatgtccggcgctgcgccggacggcgagggattgattgggattatcgccccgtataaccggctcgggctcaccgcctccggtccgcgggtcctcggcggtaagcccgatccggttatacggggcggtttcttggtgaagaga

SEQ ID NO: 17385 - RNA, 176 nt, unidentified
  source 1..176: mol_type = other RNA; note = Related to JACVAK010000003.1; note = Pseudoxanthomonas sp.
ctcttcacgcgattggcgatggaacgccgctgcgaaaggactgggtccggcgttgcgccggacgggtatggattgttgactcttatcgccccgtacagccggctaggcctcaccgccacctgctcggtggtggtaaggcctagccggctgtacggggcggtttcttggtgaagagt

SEQ ID NO: 17386 - RNA, 184 nt, unidentified
  source 1..184: mol_type = other RNA; note = Related to JACVAG010000005.1; note = Pseudoxanthomonas sp.
ctctttacgcgttaggcaagggaactgccagcactatgcgggaatggtccggcgttgcgccggacagcaaagaattgtctgggtttatcgccccgtacagccggattggtctcaccgctccggcccttcgtacctccgcggtaagcccaatccggctgtacggggcgtttttggggtaaagagt

SEQ ID NO: 17387 - RNA, 165 nt, unidentified
  source 1..165: mol_type = other RNA; note = Related to NZ_FUXP01000009.1; note = Lysobacter spongiicola
ctctttacgcgtgcgatcagggctgatcgttatgtcgggcgattcgccagactggatgaggattgtcttcacttatcggcggaaaacaccgcggggcctcacctcctccgcgttgctcccccggtaagtccccgcggcgttttccgcctatttagggtaaagagc

SEQ ID NO: 17388 - RNA, 165 nt, unidentified
  source 1..165: mol_type = other RNA; note = Related to NZ_CP041965.1; note = Xanthomonas arboricola
ctctttacgcgtgcgatcaaggtagatcgatatgtcgggcgtttcgccagactgtataaggattggtagcacttatcggcggaaagcaccgcggggtctcacctcctccgcttcgctcccccggtaagcccccgcggcgttttccgcctatctagggtaaagagt

SEQ ID NO: 17389 - RNA, 166 nt, unidentified
  source 1..166: mol_type = other RNA; note = Related to VCME01000014.1; note = Xanthomonas hortorum
ctctttacgcgtttgatcatggctgatctgcttgtcgggcgtttcgccagactgtataaggattgttgacttttatcggcggaaaacaccgcgaggccttacctcctccgcgtgcgctcccccggtaaggcctcgcggcgttttccgcctttttaaggtaaagaga

SEQ ID NO: 17390 - RNA, 166 nt, unidentified
  source 1..166: mol_type = other RNA; note = Related to JAAAEX010000007.1; note = Stenotrophomonas maltophilia
ctctttacgcgcttggtcaaggtagatcgaattgtcgggcgtttcgccagactgtataaggattgtcggtatttatcggcggaaaacaccgcggggcctcacctcccccgcatgcgctcccccggtaagtccccgcggcgttttccgcctatttaaggtaaagagt

SEQ ID NO: 17391 - RNA, 164 nt, unidentified
  source 1..164: mol_type = other RNA; note = Related to NTJG01000001.1; note = Xanthomonadaceae bacterium NML93-0793
ctctttacgcgaatgatcaggattgatcaaattagtcgggcgcttcgccagacagtttaaggattgacggtatttatcggcggaaaacaccgcggggcctcacctccgcagaagctcctccggtaagtccccgcggcattttccgcctttaaaaggtaaagggt

SEQ ID NO: 17392 - RNA, 181 nt, Nitrosomonas sp.
  source 1..181: mol_type = other RNA; note = Related to FODO01000031.1
ctctttacgcgttcggggctttaaaaaaatctcatatggttttatagccttagtccggcgcttcgccagacttttattattggtagtatttgtaggcacaaaatccgtgatcgatcagactgcgcgtaaaacagcttgctgatcgctcccaaattttgtgcctatttttagggtaaagaga

SEQ ID NO: 17393 - RNA, 152 nt, unidentified
  source 1..152: mol_type = other RNA; note = Related to NZ_BMMF01000004.1; note = Salinarimonas ramus
ctctttacgcgaacggggggctacccccctgccgggcgtttcgccaggcaatcgaaaattgatcgagtttaacggcgcggacgacgggcttaactgcaccgaagtctcggcgcagttaagcccgtcgtccgcgccttctttaggtaaagagc

SEQ ID NO: 17394 - RNA, 177 nt, unidentified
  source 1..177: mol_type = other RNA; note = Related to NZ_RXOL01000001.1; note = Croceicoccus ponticola
ctctttacgcgtaagttggagttccatccccaacttcgtcgggcgcttagccagacgtttatgttattgggagcgtttatcggcaggaaaggcctggagagctcatctcttcggcaagcctcgcccttcgggccgatgacctctccaggcctttcctgccttcctgaggtaaagaga

SEQ ID NO: 17395 - RNA, 193 nt, unidentified
  source 1..193: mol_type = other RNA; note = Related to NZ_CP069354.1; note = Microvirga sp.
ctctttacgcgtttcgagtcgatcaaggtttccccttgtgaaactcggtcgggcgcttcgccagacagaccgttattgggtaggtttatcggcatgaaggaggctggagagttcatctctcgtcgcctttagctcctcgcccttcggtacgatgacctctccagcctccttcataccttcaaaggtaaagagt

SEQ ID NO: 17396 - RNA, 188 nt, unidentified
  source 1..188: mol_type = other RNA; note = Related to QRGO01000001.1; note = Undibacter mobilis
ctctttacgcgtttcgaatctgtttgggtaaccaagcgggttctcgtcgggcgcttagccagacataacgttattgtggaggtttatcgggatggtgagggtcggagagcttatctctcgtcgctctcgctcctcgcctgcggccgataagctctccgaccctcaccatcccttcaacggtaaagagc

SEQ ID NO: 17397 - RNA, 190 nt, unidentified
  source 1..190: mol_type = other RNA; note = Related to SALN01000219.1; note = Mesorhizobium sp.
ctctttacgcgaaaggagtcggtcgcaactgtatcgatcttctcttgtcgggcgcttagccagacatcacgttattgtgggcgtttatcggtatgaacaagcccgaggaggccatctctcgtcgccttcgctcctcgcctgcggccgatgccctcctcgaactagttcatacctctcaaaggtaaagagt

SEQ ID NO: 17398 - RNA, 188 nt, unidentified
  source 1..188: mol_type = other RNA; note = Related to NZ_CP011479.1; note = Hoeflea sp.
ctctttacgcgtatgagagtggttcagaaattctgttccttctcttgtcgggcgcttagccagacattctgttattgtgagcgtttatcggcatgagcatggccaagaaggccatctctcgtcgcttcgctcctcgtctacgagcgatgtccttcttggccatgctcatacctttaagggtaaagagc

SEQ ID NO: 17399 - RNA, 186 nt, unidentified
  source 1..186: mol_type = other RNA; note = Related to JAHBYX010000006.1; note = Mesorhizobium sp.
ctctttacgcgaatggagtcggtcctcgtttggatcagctcttgtcgggcgtttcgccagacattctgttactgtgggcgtttgtcggtatgaacggggttgagaaggccatctctcgtcgcctatgctcctccccttcgggccgatgcccttctcaaccccgttcataccttctaggtaaagagt

SEQ ID NO: 17400 - RNA, 176 nt, unidentified
  source 1..176: mol_type = other RNA; note = Related to RXIO01000070.1; note = Ancylobacter aquaticus
ctttttacgcgctaggggagcgcaagctccccgagtcgggcgattcgccagacaaattaagattgctgaggtttatcggcagggaagtcttcggagaggtcggctctcgtcgccagctcctcgcctcccggccgccgacctctccaaagccttccctaccgtcaaaggtaaagagc

SEQ ID NO: 17401 - RNA, 177 nt, unidentified
  source 1..177: mol_type = other RNA; note = Related to CP090554.1; note = Neorhizobium galegae
ctctttacgcgttttgagccatcactttggtgatggttccgtcgggcgctaagccagacggtaatgacattgtgagcgtttatcggcaggaagaagctcgagagtccacctctcggcttacgcctcgttaccaccggtgaactctcgatcttcttcccgccttcagaggtaaagagt

SEQ ID NO: 17402 - RNA, 179 nt, unidentified
  source 1..179: mol_type = other RNA; note = Related to NZ_PCDP01000036.1; note = Rhizobium tubonense
ctctttacgcgttttgagtcgtcaactgagttgatcggctacgtcgggcggtaagccagacggaattaaaactgtgagcgtttatcggcaggaagaagaccgagagttcacctctcggcttacgcctcgttccaccggtgaactctcggtcttcttcctaccttccagaggtaaagagt

SEQ ID NO: 17403 - RNA, 169 nt, unidentified
  source 1..169: mol_type = other RNA; note = Related to NZ_FPAJ01000001.1; note = Sulfitobacter marinus
ctctttacgcgtttgaacctgcgtggttccgtcgggcgtttagccagacgacatgttattggggggtcttatcggcaggtagatcgtggactagccatctctcggctatcgcctcgcctacggtcgatggctactccacgatctacctgcctctttaagggtaaagaga

SEQ ID NO: 17404 - RNA, 169 nt, unidentified
  source 1..169: mol_type = other RNA; note = Related to NZ_SDEA01000022.1; note = Paracoccus luteus
ctctttacgcggatgaaccttcgtggttccgtcgggcgcttagccagacgaattgttattgggtggtcttatcggcaggaagctcgtggagcagccatctctcggcttgcgcctcgcctgacggccgatggctgctccacgagcttcctgcctcctaagggtaaagagc

SEQ ID NO: 17405 - RNA, 177 nt, unidentified
  source 1..177: mol_type = other RNA; note = Related to NZ_LMEM01000009.1; note = Devosia sp.
ctctttacgcgttttgaaccaggcgtgcttggttccgtcgggcgcttagccagacgtcccgttattgataggtcttatcggcaggactagacgcgagaactcatctctcggctacgcctcgcaccttcggcaccgatgagtcctcccgtctactcctgcctctctgaggtaaagagc

SEQ ID NO: 17406 - RNA, 171 nt, unidentified
  source 1..171: mol_type = other RNA; note = Related to JAFKLT010000057.1; note = Sphingomonadales bacterium
agcttcacgcgaatgggccttgcgccctgtcgggcggttcgccagacatgcatggattgaacgatattggcggctcggttcggccttgggttcccttggccctacggggcgttctcttcgttcactccaaggaaacccaaggccgaaccgagcctttcaaaggtgaagctt

SEQ ID NO: 17407 - RNA, 149 nt, unidentified
  source 1..149: mol_type = other RNA; note = Related to AWFC01000023.1; note = Hyphomonas sp.
gttcttacgcgtaatcaccggtttgtcgggcgtttcgctagactgaaatgtgattggttctatctagggcgcgcttagagtcgcgaattctaagccgacacggtcgccttagaattcgcgactctaagcgtcgctcaaaggtaagaaat

SEQ ID NO: 17408 - RNA, 186 nt, unidentified
  source 1..186: mol_type = other RNA; note = Related to DOSK01000382.1; note = Brevundimonas sp.
ctctttacgcgtaggtcgattccccgtgaaccgatctgtgtcgggcgcttcgccagaccatacgttattgtgaggtttaatcggtagggatgggtcccgagggctcatctcttcgtcgcggaaggctcctcggccttcggcccgatgacccctcgcgacccatccctaccttcacaggtaaagaga

SEQ ID NO: 17409 - RNA, 186 nt, unidentified
  source 1..186: mol_type = other RNA; note = Related to FOOA01000003.1; note = Aureimonas phyllosphaerae
ctctttacgcgtctaaggtgtcctggaatcaggagccctgtcgggcgatcagccagacagaatggtattgtggaggtttatcggtatgaagaagaccgggagtttatctctcgtcaccttcgttcctcgtcgccttgcgagcgataaactcccggtcttcttcataccttttctgaggtgaagggc

SEQ ID NO: 17410 - RNA, 138 nt, Vibrio sp.
  source 1..138: mol_type = other RNA; note = Related to CP023054.1; note = Vibrio anguillarum
atctttacgcgttagaagcgttgttgacttcatctggtgtatcactggaatattttgattgtttatattttgaccacggtcacgacaaaaatcgcttcgcgatttgttgtcgcaaccgtgcccatctaggtaaagatt

SEQ ID NO: 17411 - RNA, 137 nt, unidentified
  source 1..137: mol_type = other RNA; note = Related to CH724143.1; note = Photobacterium sp.
atctttacgcgttagaagcgttgctgacttcatctggtgtatcactagaatattttattgtttatattttgatcacggtcacgacaaaaatcgcttcgcgatttgttgccgcaaccgtgcccatctaggtaaagatt

SEQ ID NO: 17412 - RNA, 137 nt, Vibrio sp.
  source 1..137: mol_type = other RNA; note = Related to JAKKCQ010000002.1
atctttacgcgtaagaagcgttgacgacttcatctggtgtatcactagaattattgattgtttataatttgaccacggtcacgtcaaaaatcgcttcgcgatttgttgccgcaaccgtgtccatctaggtaaagatt

SEQ ID NO: 17413 - RNA, 137 nt, Proteus sp.
  source 1..137: mol_type = other RNA; note = Related to JADRZV010000010.1; note = Proteus mirabilis
atctttacgcgttagaagcgctactgacttcatctggtgtatcactagaatatttgattgtttatattttgaccacggtcacgtcaaaaatcccttcgtgatttgttgccgcaaccgtggccatctaggtaaagatt

SEQ ID NO: 17414 - RNA, 137 nt, unidentified
  source 1..137: mol_type = other RNA; note = Related to NZ_LTZD01000015.1; note = Aliivibrio fischeri
atctttacgcgaacgaagcgttgtcgacttcatctggtgtatcactagaatttttgattgtttatattttgaccacggtcacggcaaaaatcgcttcgcgatttattaccgcaaccgtgcccatctaggtaaagatt

SEQ ID NO: 17415 - RNA, 137 nt, unidentified
  source 1..137: mol_type = other RNA; note = Related to PYNJ01000059.1; note = Photobacterium kishitanii
atctttacgcgaagaagcgttacagacttcatctggtgtatcaccggaatttaacgattgttatccttttgatcacggtcactccaaaaatcgcttcgcgatttgttgtcgcaaccgtgaccatctaggtaaagata

SEQ ID NO: 17416 - RNA, 134 nt, unidentified
  source 1..134: mol_type = other RNA; note = Related to CP045427.1; note = Shewanella sp.
atctttacgcgttagaagtatatcttcatccggcgtatcgccggagcttagtaattgggtaaaattacgagcacgatactcgaaaaatcgctacgcgatttgttctcgcatcgtgcccgatctaggtaaagata

SEQ ID NO: 17417 - RNA, 135 nt, Vibrio sp.
  source 1..135: mol_type = other RNA; note = Related to NZ_CP042449.1; note = Vibrio alginolyticus
gtctttacgcgttagaagtataatcttcatctggcgtatcgccggagctttgtaattgggtaaaattacgagcacgatactcgaaaaatcgcttcgcgatttgttctcgcatcgtgcccgatctaggtaaagata

SEQ ID NO: 17418 - RNA, 132 nt, Salmonella sp.
  source 1..132: mol_type = other RNA; note = Related to AAIODZ010000022.1; note = Salmonella enterica
ctctttacgcgatagaggcgtacttgcttcatccggtgtatcactggaatttttcgattgtggtcatttatgccacggccttcccaaaaatcttcgatttttactcaggccgtgcccttctaggtaaagagc

SEQ ID NO: 17419 - RNA, 132 nt, unidentified
  source 1..132: mol_type = other RNA; note = Related to NZ_CP025085.1; note = Serratia sp.
ctctttacgcgatagaggcgtatctgcttcatctggtgtatcaccggaacttgttgattgtggtcatttatgccacggccttcccaaaaatcttcgatttttactcaggccgtgcccttctaggtaaagagc

SEQ ID NO: 17420 - RNA, 134 nt, unidentified
  source 1..134: mol_type = other RNA; note = Related to DAEHES010000012.1; note = Serratia fonticola
ctctttacgcgtttgaagcgtatacagcttcatccggtgtatcaccggaacttttggattgtggctatttgggccacggtctgagtgaaaatctcacgattttaactcagcccgtgcctttcttggtaaagagc

SEQ ID NO: 17421 - RNA, 133 nt, unidentified
  source 1..133: mol_type = other RNA; note = Related to JAFJZU010000009.1; note = Pectobacterium brasiliense
ctctttacgtgtttgaagcgtatacagcttcatctggtgtatcaccagaacttttagattgtggccacttatgacacggtcaccgtaaaaatcgcagatttttacgccgcccgtgcctttcttggtaaagagt

SEQ ID NO: 17422 - RNA, 159 nt, unidentified
  source 1..159: mol_type = other RNA; note = Related to NZ_CP009769.1; note = Pectobacterium brasiliense
actctttagcgttaggctttgatttatagccttgtcgagcgttccgccagacactaacttattgagtacttttagggttgcgctagaaagttttctaccgatcctagaagtctctaggatcggtagaaaactttctagcgcctcctctagtaaagagta

SEQ ID NO: 17423 - RNA, 140 nt, unidentified
  source 1..140: mol_type = other RNA; note = Related to NZ_CP034015.1; note = Shewanella livingstonensis
gtctttacgcgctagaagcgtgatctgcttcatctggtgtatcactagaagtgtttgattgttagtttttctgagcacggccaccacgaaaatcggcaagccgatttgtcgcggcgtccgtgccctttaaggtaaagata

SEQ ID NO: 17424 - RNA, 140 nt, unidentified
  source 1..140: mol_type = other RNA; note = Related to JAHKRD010000001.1; note = Shewanella sp.
aactttacgcgctagaagcgtgacttgcttcatccggtgaatcgctggaactattagattgttgttttttctgagcacggccaccacgaaaatcgcttcgcgatttatcgcggcgtccgtgcccttttaaggtaaagtgt

SEQ ID NO: 17425 - RNA, 141 nt, Aeromonas sp.
  source 1..141: mol_type = other RNA; note = Related to NZ_CDBP01000069.1; note = Aeromonas dhakensis
aactttacgcgtgtgaagcatgcgagcggcttcatctggtgtatcaccggagctttatgattgtgctcatttatgagcacggccaccgcgaaaatcgcttcgcgatttatcgcggcgtccgtgccctttaaggtaaagtat

SEQ ID NO: 17426 - RNA, 139 nt, Vibrio sp.
  source 1..139: mol_type = other RNA; note = Related to CP001805.1
tactttacgcgcttgaagcgtgacctgcttcatctggtgtatcaccggagctttaaattgtgtttttttatgagcacggtcaccacgaaaatcggcaagccgatttgtcgtggcgtccgtgccctttaaggtaaagtta

SEQ ID NO: 17427 - RNA, 139 nt, Vibrio parahaemolyticus
  source 1..139: mol_type = other RNA; note = Related to CP006004.1
tactttacgcgctagaagcgtgaccagcttcatctggtgtatcaccggagctttgtattgtggttttttatgagcacggtcaccacgaaaatcggcgggccgatttgtcgtggcgcccgtgccctttaaggtaaagtac

SEQ ID NO: 17428 - RNA, 135 nt, unidentified
  source 1..135: mol_type = other RNA; note = Related to NZ_SRZX01000002.1; note = Marinobacter orientalis
tgtcttacgcgttaagcaatgacagcttaggtctggcgctccgctagatttcacgattgacggtcatgaagtcacgtgatcacgaaacccctaaaacgggctttcgcgctcacgtgcctttctaggtaagcacaa

SEQ ID NO: 17429 - RNA, 142 nt, unidentified
  source 1..142: mol_type = other RNA; note = Related to DACSHB010000002.1; note = Legionella pneumophila
tgttttatgcggatttattggttttgctcggcgtttcgctgagctataaattggattggttaaatttataagcgagttattggataaatttaatcaattttgattaaatttatccaataactcgatttcaaagataaaacac

SEQ ID NO: 17430 - RNA, 142 nt, unidentified
  source 1..142: mol_type = other RNA; note = Related to DACVYU010000020.1; note = Legionella pneumophila
tgttttatgcggatttattggttttgctcggcgtttcgcagagctataaataggattggttaaatttataaacgagttattggataaatttaatcaaaattgattaaatttatccaataactcggtttcaaagataaaacat

SEQ ID NO: 17431 - RNA, 168 nt, Pseudomonas sp.
  source 1..168: mol_type = other RNA; note = Related to JACYWS010000002.1; note = Pseudomonas syringae
ctctttacgcgtttaaagccagacgctagtcgtcgagggcttagtcaggcgtttcgccagactcaatcgcattgcgttgttttattccgcagacaagatctgcggccctacgctccttcgtcgctccggtccacagatcttgtctgcggctgttccttggtaaagagt

SEQ ID NO: 17432 - RNA, 168 nt, Pseudomonas sp.
  source 1..168: mol_type = other RNA; note = Related to NZ_JACOPX010000017.1; note = Pseudomonas neuropathica
ctctttacgcgtttaaagccagatactagtcgttgaaggcttagtcaggcgtttcgccagactcaattgcattgcgttgttttattccgcagacaagatctgcggccctacgctccttcgtcgctccggtccacagatcttgtctgcggctgaaccttggtaaagagc

SEQ ID NO: 17433 - RNA, 169 nt, Pseudomonas sp.
  source 1..169: mol_type = other RNA; note = Related to CP089062.2; note = Pseudomonas aeruginosa
ctctttacgcgtttaaagctagatgctagtcgctgaaggcttagtcaggcggttcgccagactcaactgtattgcgttgttttattccgcagacaagatctgcggccctacgactccttcgtcgctccggtccgcagatcttgtctgcggctgtaccttggtaaagagc

SEQ ID NO: 17434 - RNA, 169 nt, Pseudomonas sp.
  source 1..169: mol_type = other RNA; note = Related to NZ_CP077094.1; note = Pseudomonas promysalinigenes
ctctttacgagtttaaagctagcagctatttgctgaaggcttagtcaggcgcttcgccagactcaatagcattgcgttgttttattccgcagacaagatctgcggccttacgactccttcgtcgctccagtccgcagatcttgtctgcggctgtaccttggtaaagagc

SEQ ID NO: 17435 - RNA, 172 nt, Pseudomonas sp.
  source 1..172: mol_type = other RNA; note = Related to JACGDE010000010.1; note = Pseudomonas mosselii
ctctttacgcgtttaaagcttgaagctagtcgctgaaagcttagtcaggcggttcgccagactcaattgcattgcgttgttttattccgcagacaagatctgtggccctacgctcgctactcgctcactccggtccacagatcttgtctgcggctgttccttggtaaagagc

SEQ ID NO: 17436 - RNA, 170 nt, Pseudomonas sp.
  source 1..170: mol_type = other RNA; note = Related to NZ_CP035088.1; note = Pseudomonas viciae
ctctttacgcgtttatagctagacggtttccgtcaatggcttagtcaggcggttcgccagactcaattgcattgcgttgttttattccgcagacaagatctgcggccctacgctcgcttcgctcactccggtccacagatcttgtctgcggctgattcttggtaaagagc

SEQ ID NO: 17437 - RNA, 169 nt, Pseudomonas sp.
  source 1..169: mol_type = other RNA; note = Related to NZ_CP014205.2; note = Pseudomonas glycinae
ctctttacgcgttcatagcttgatggtttccatcattgcttagtcaggcgcttcgccagactcaattacattgcgttgttttattccgcagacaagatctgcggccctacgctcgcttcgctcactccggtccacagatcttgtctgcggctgattcttggtaaagagc

SEQ ID NO: 17438 - RNA, 169 nt, Pseudomonas sp.
  source 1..169: mol_type = other RNA; note = Related to NZ_CP031641.1; note = Pseudomonas parafulva
ctctttacgcgtttaaagctcgaagctagtcgctgaaggcttagtcaggcgattcgccagactcaattgcattgctttgttttattccgcagacaaggtctgcggccctacgactcctccgtcgctccggtccgcagaccttgtctgcggctgtaccttggtaaagagc

SEQ ID NO: 17439 - RNA, 173 nt, Pseudomonas sp.
  source 1..173: mol_type = other RNA; note = Related to NZ_CP019428.1
ttctttacgcgttcaaagcttgatagcagacgctgtcttaaggcttagtcgggcgtttcgccagactcaaaatcattgcttggttttattccgcagacaagatctgcggacctacactcgcaagctccctccggtccgcagatcttgtctgcggctgattcttggtaaagagc

SEQ ID NO: 17440 - RNA, 174 nt, Pseudomonas fluorescens
  source 1..174: mol_type = other RNA; note = Related to NZ_CABVJA010000003.1
ttctttacgcgttcaaagctagtcagcatatgctgtctgaaggcttagtcgggcgtttcgccagactcaaatttattgcttggctttattccgcagacaagatctgcggacactacggtcgcaagctccctccggtccgcagatcttgtctgcggctgattcttggtaaagagc

SEQ ID NO: 17441 - RNA, 171 nt, Pseudomonas sp.
  source 1..171: mol_type = other RNA; note = Related to NZ_JAAQXL010000002.1; note = Pseudomonas proteolytica
ctctttacgcgaacaaagtcgaaagaccgttttgtctgaggcttagtcgggcgtttcgccagactcatatgcattgcttggatttattccgcagagaaaatccgcggacctacagtcgcaagctccctccagtccgcgaattttctctgcggctgattcttggtaaagagt

SEQ ID NO: 17442 - RNA, 171 nt, Pseudomonas sp.
  source 1..171: mol_type = other RNA; note = Related to BPLZ01000028.1
ttctttacgcgaatagagccaagggtctcaacaatccacaggcttagtcgggcgcttagccagactcaataatattgcttcgttttgttccgcagagaagttctgcggacctacacatgaagcgcgttccggtccgcagaacttctctgcggctgttccttggtaaagagc

SEQ ID NO: 17443 - RNA, 170 nt, Pseudomonas sp.
  source 1..170: mol_type = other RNA; note = Related to CP041771.1; note = Pseudomonas aeruginosa
ttctttacgcgttttgggcttcaagttctagggcttaagctcagtcgggcgcttagccagactcaattgattgtgcagttttattccgcagataagctctgcggccctccggtcgcattcgctccctgcggtccgcagatcttatctgcggctggtccttggtaaagaac

SEQ ID NO: 17444 - RNA, 162 nt, unidentified
  source 1..162: mol_type = other RNA; note = Related to LASC01000001.1; note = Burkholderia contaminans
ttctttacgcgaatatagctagaacgatttgcttagcttagtcgggcgtttagccagactcattttcattgcttggttttattccgcagctaacggctgcggccctccaggcgctgccttacggtccacagccgttatctgcggccggttcaggtaaagaac

SEQ ID NO: 17445 - RNA, 162 nt, unidentified
  source 1..162: mol_type = other RNA; note = Related to NZ_CADEWJ010000002.1; note = Burkholderia gladioli
ttctttacgcgaatatagctaggacgatttgtatagcttagtcgggcgtttagccagactcaattttattgcttggttttattccgcagctaacggctgcggccctccaggcggagccttacggtccgcagccgttagctgcggccggttcaggtaaagaac

SEQ ID NO: 17446 - RNA, 169 nt, unidentified
  source 1..169: mol_type = other RNA; note = Related to NZ_CP017757.2; note = Cupriavidus necator
ttctttacgcgaatagagcctgtgtcgaaattgaatacagcttagtcgggtgtttagccagactccatttgattgcttggacttattccgcagataaggtctgcggtcctccagtcgcaagcgccctccggcccgcagcccttatctgcggacgttctaggtaaagaac

SEQ ID NO: 17447 - RNA, 179 nt, unidentified
  source 1..179: mol_type = other RNA; note = Related to QFXG01000005.1; note = Candidatus Nitrotoga sp. SPKER
ttctttacgtgaataaagcttattaaggttgtttgcttaataacttagtcgggtgtttagccagactctatataaattgtgtggatttaggccgcagataatttctgcggctctccgttcgcaaaatcagctctctacgatccacagaaattatctgcggcacgttctaggtaaagaac

SEQ ID NO: 17448 - RNA, 173 nt, unidentified
  source 1..173: mol_type = other RNA; note = Related to JABFOH010000005.1; note = Acidithiobacillus ferrooxidans
ttctttacgtgaataaagcttattaaggttgttaacttaatggcttagtcgggcgtttagccagactctattatattgtatggacttaggccgcagatagtttccgcggttctccgttcgcaagctctctacgatccgcggaaactatctgcggcacgttctaggtgaagaac

SEQ ID NO: 17449 - RNA, 170 nt, unidentified
  source 1..170: mol_type = other RNA; note = Related to NZ_RJUK01000001.1; note = Marinimicrobium koreense
tcttccacgagaacagagctttatactttataaaagcttagtcgggtgtttagccagactctacttgcattgcgtggttttattccgcagataacatctgcggatctccaatcgcgccagcgctcattacgatccacagatgttatctgcggagatcagaggtgggagaa

SEQ ID NO: 17450 - RNA, 146 nt, unidentified
  source 1..146: mol_type = other RNA; note = Related to MVDH01000001.1; note = Cellvibrio sp.
gcttttacgtgaataaagcctatggcttagtcgggtgtttagccagactctattttattgggtggttttattccgcagataacatctgcgtatctccacttcgttacgatccacagatgttatctgcggacgcttaggtaaaagct

SEQ ID NO: 17451 - RNA, 167 nt, Pseudomonas sp.
  source 1..167: mol_type = other RNA; note = Related to NZ_BQIK01000019.1
ctctttacgcgtttgctttatgctttttagctaaagctagtcgggcgtttcgccagactctactgagattggttagatttattccgcagagaatttccgcggacctccagtcgcaagctccgttccgatccgcgaaaattctctgcggccggatcttggtaaaggca

SEQ ID NO: 17452 - RNA, 166 nt, Pseudomonas sp.
  source 1..166: mol_type = other RNA; note = Related to JAFFZW010000005.1; note = Pseudomonas alliivorans
ttctttacgcgtacaagctcggtctcggtaccgatgcttagtcgggcgattagccagactctagaaaattgcttggatttattccgcagagaatatctgcggccctccaatcgcgggctcattacggtccacagatattctctgcggctgtttcttggtaaagaac

SEQ ID NO: 17453 - RNA, 165 nt, Pseudomonas sp.
  source 1..165: mol_type = other RNA; note = Related to MSXW01000061.1
ttctttacgcgtaaaagctaggctgcacagccagagcttagtcaggcgcttcgccagactctatgaaattgtttggttttattccgcagacgaaatctgcggccctccaatcgcaagctcattacggtccacagattccgtctgcggctgtccttggtaaagaat

SEQ ID NO: 17454 - RNA, 163 nt, Pseudomonas sp.
  source 1..163: mol_type = other RNA; note = Related to POUU01000009.1; note = Pseudomonas stutzeri
ttctttacgcgtatagctaggctgtaagccagagcttagtcgggcgcttagccagactctatgaaattgtttggatttattccgcagagaatctctgcggccctccactcgcaagctccctacggtccacagagattctctgcggccgttcttggtaaagaaa

SEQ ID NO: 17455 - RNA, 176 nt, unidentified
  source 1..176: mol_type = other RNA; note = Related to SDYH01000002.1; note = Alphaproteobacteria bacterium
gtctttacgcgaacagagcgtttacacgttacaacgttgcaaaagcttagtcgggcgtttagccagactcatatttattgcttggtcttaagccgcagagcttctccgcggtcctacattcgacaagctctctccggcccgcggagaatctctgcggctgatttcaggtgaagaca

SEQ ID NO: 17456 - RNA, 170 nt, unidentified
  source 1..170: mol_type = other RNA; note = Related to JACVPK010000010.1; note = Polynucleobacter wuianus
ttctttacgatgatattgctttaatagtatttatattaggcatagtcgggcgtttagccagactctatttgattgtttggatttaatccgcagattcgctccggatgcctccaagcaaaaccagctttacggcctccagaccaaatctgcggctcgttcaggtaaagagc

SEQ ID NO: 17457 - RNA, 174 nt, unidentified
  source 1..174: mol_type = other RNA; note = Related to JACYMM010000001.1; note = Janthinobacterium sp.
ttctttacgcgaataaaattgccgacattcatcatcgtttgcaatttagtcgggcgattagccagactctattttattgcttggacttgagccgcagcgacaatttgcggccctacgttcggcgagctctctccagtccgcaaattgtcgctgcggctgttctaggtaaagaac

SEQ ID NO: 17458 - RNA, 168 nt, unidentified
  source 1..168: mol_type = other RNA; note = Related to NZ_CP033019.1; note = Janthinobacterium agaricidamnosum
ttcttcacgcgaatgtggttacgaaagtatccgtaacttagtcgggcggttagccagactctatatgattgtggcgacatgagccgcagcggcattttacggccctacgctcgctcacgctcgactccgatccgcaaaatgccgctgcggcttttctaggtgtagaac

SEQ ID NO: 17459 - RNA, 171 nt, unidentified
  source 1..171: mol_type = other RNA; note = Related to NZ_WNKY01000042.1; note = Duganella radicis
ttctttacgcgaataaagactcatctttcgagatgtagccttagtcgggcgattagccagactctatgggattgattggacttgagccgcagcgaaaatttgcggccctacaatcggctccgcctcattccggtccgcaaatttccgctgcggcttttctaggtgaagaat

SEQ ID NO: 17460 - RNA, 173 nt, unidentified
  source 1..173: mol_type = other RNA; note = Related to LRON01000007.1; note = Duganella sp.
ttctttacgcgaacaaagactcatctcattgagatgttggcttagtcgggcgattagccagactctattggattgatctcacttgagccgcagcgaaaatttgcggccctacaatcggcttgcgcctcattccggtccgcaaatttacgctgcggcttttctaggtgaagaat

SEQ ID NO: 17461 - RNA, 161 nt, unidentified
  source 1..161: mol_type = other RNA; note = Related to NZ_CP016442.1; note = Burkholderia stabilis
ttctttacgcgaacagagctaggcagcttttaggttttagcttagtcgggcgattagccagactccttttgattgggcggccctattccgcggataagctctgcggccctccgcccgctacggtccgcagagcttatccgcggccgttctaggtaaagaac

SEQ ID NO: 17462 - RNA, 168 nt, unidentified
  source 1..168: mol_type = other RNA; note = Related to NZ_CADEZN010000001.1; note = Burkholderia gladioli
ttctttacgcgaacacggctagacaccgttgtgccttagcttagtcgggcgattagccagactctttttgattggacggtcctattccgcggataagctccgcggccctccgttcgtgtcctcactacggtccgcagagcttatccgcggccgttctaggtaaagaac

SEQ ID NO: 17463 - RNA, 155 nt, unidentified
  source 1..155: mol_type = other RNA; note = Related to JAGMZN010000009.1; note = Acidovorax sp.
gctttttagctaaagacttaaaagcttagtcgggcgctccgccagactctatttcattgtttggatttattccgcagagaagctctgcgagcctacgttcgcaagctctctccgactcgcagatcttctctgcggtcgattcttggtaaagacac

SEQ ID NO: 17464 - RNA, 164 nt, unidentified
  source 1..164: mol_type = other RNA; note = Related to NZ_KI911557.1; note = Methylomonas sp.
ttctttacgcgaataaagcttaaaagtataaacatacttagcttagtcgggcgtttagccagactctttagaattgcttggacttattccgcagatacactctgcggccctccgtttgcactccggtccacagagtgtatctgcggttgatcttggtaaagaac

SEQ ID NO: 17465 - RNA, 174 nt, unidentified
  source 1..174: mol_type = other RNA; note = Related to NZ_BMXS01000014.1; note = Halomonas qijiaojingensis
gttctttagcgtttctgactaacaagtactgtttgacttgttagtttagtcgggcgattagccagactcaaaatattgcttggttttatgaccgcagatgacttctgcggatctacattcgcaagctcattccgatccgcagaagtcatctgcggccggttcaggtaaaggaca

SEQ ID NO: 17466 - RNA, 172 nt, unidentified
  source 1..172: mol_type = other RNA; note = Related to JABJWH010000040.1; note = Alcanivorax profundimaris
gctctttagcgtttgagcttacacattaatcgtgctgtgagcttagtcgggcgataagccagactcaaagtattgcttgcatttatggccgcagataccttctgcggctctacattcgcaagctcattccgacccgcagaaggtatctgcggccggcttcaggtaaagagct

SEQ ID NO: 17467 - RNA, 169 nt, Pseudomonas sp.
  source 1..169: mol_type = other RNA; note = Related to VOJF01000050.1; note = Pseudomonas aeruginosa
gtccttacgcgatcatagccacaagggactcccttaaggcttagtcgggcgcttcgccagactcaaatgcattgcttcgatttattccgcagagaatgtctgcgggcctacgatcgcaagcgatctccaacccgcagccatcctctgcgggcggtccgaggtgagggca

SEQ ID NO: 17468 - RNA, 169 nt, Pseudomonas sp.
  source 1..169: mol_type = other RNA; note = Related to NZ_UATW01000001.1; note = Pseudomonas aeruginosa
gtccttacgcgatcaaagccacaaggtacgcccttaaggcttagtcgggcgtttcgccagactcaaatgcattgcttcgatttattccgcagagaatgtctgcgggcctacgatcgcaagcgatctccgacccacagacattctctgcgggcggtccgaggtgaggaca

SEQ ID NO: 17469 - RNA, 169 nt, Pseudomonas sp.
  source 1..169: mol_type = other RNA; note = Related to NZ_CP015992.1
gtctttacgcgattaaagcctacagttctctaacttgtggcttagtcaggcgatacgccagactcaaatgcattgcttggttttattccgcagagaagatctgcgggcctacactcgcaagctcattccgacccgcagatcttctctgcggctgtccgaggtaaagaca

SEQ ID NO: 17470 - RNA, 156 nt, unidentified
  source 1..156: mol_type = other RNA; note = Related to PBYC01000020.1; note = Oceanospirillaceae bacterium
gactttacgcgaataaagccagttggcttagtcaggcgaatcgctagactctattttattgcgatgttttatcccgcagatatcacctgcggctatccgttcgcaagctcactactatccacaggcaatatctgcggttggtacaaggtaaagtac

SEQ ID NO: 17471 - RNA, 156 nt, unidentified
  source 1..156: mol_type = other RNA; note = Related to JALE01000028.1; note = Thalassolituus oleivorans
aactttacgcgaatagagccatttggcttagtcaggcgaatcgctagactctatgttattgcgaagatttatcccgcagatatgtgctgcggttatccgttcgcaagctcactactaaccacaccccacatctgcggttggtacaaggtaaagtta

SEQ ID NO: 17472 - RNA, 150 nt, unidentified
  source 1..150: mol_type = other RNA; note = Related to DNYL01000221.1; note = Halomonas sp.
ccttttacgcgtacagaaatagccgggtgtatagccaggctcaaaagaaattgggtatatttaatccgcatgtcttgctgtgtggcttgctgcggaaccccatgcagcaagccacacagcaagacatgcggctgcatcttggtaagaggt

SEQ ID NO: 17473 - RNA, 150 nt, unidentified
  source 1..150: mol_type = other RNA; note = Related to NZ_SOCZ01000001.1; note = Halomonas alkaliantarctica
ccttttacgcgttcagtatttgccgggtgtatagccaggctcaaatgaaattgggtatatttaatccgcatgtcttgctgtgtggcttgctgcggaaccccatgcagcaagccacacagcaagacatgcggctgcatcttggtaagagga

SEQ ID NO: 17474 - RNA, 165 nt, unidentified
  source 1..165: mol_type = other RNA; note = Related to NZ_ONZI01000001.1; note = Kushneria phyllosphaerae
ctttttacgcgttcattagcaattttttagctatagccgggtgtatagccaggctcaaaagcgattggagagatttattccgcatagaaatgctgcgggttttcgctccgcttcgctccactcgaacccgcagcatttctatgcggctgcttcgtggtaaaaagc

SEQ ID NO: 17475 - RNA, 168 nt, unidentified
  source 1..168: mol_type = other RNA; note = Related to CP026050.1; note = Serratia marcescens
gctctaaacgtgtatggcatatttagttatgcttgtcgggcgcttagccagacacttttatattgaacggctttagggttgcgcttggtgtgcctctggattgcactcctagttgcacgtcgtcgcgcaatccagaggcacaccaagcgcttcctctaggtaagagca

SEQ ID NO: 17476 - RNA, 165 nt, unidentified
  source 1..165: mol_type = other RNA; note = Related to CP034474.1; note = Pantoea agglomerans
gctctttagcgtggtatggatttcaccactcaacggttaaatctagttcggcgttacgcagaactctaacttattgattatatttacagttgcggaacaaaatttctgaaccgcagccgtagttgcggatcagaaattttgttccgcggctactagtaaagagca

SEQ ID NO: 17477 - RNA, 152 nt, unidentified
  source 1..152: mol_type = other RNA; note = Related to NZ_CP021235.1; note = Pontibacter actiniarum
ttgaattagtttttaaactttaatttaattaaagttttgtcgggtgtaaaccagacacttattgtattttttacctttggaagcaagctaataagctgttgctccccaaggggagcaacagcttattagcttgcttccctttgtaattcgat

SEQ ID NO: 17478 - RNA, 142 nt, unidentified
  source 1..142: mol_type = other RNA; note = Related to NZ_RCTY01000045.1; note = Lysobacter enzymogenes
taggtttatcgcataccagcgaccaggagtagctccggtctaatgtctggtccctagggcgttttatcaatttacgtatgcccggtcgctggcccacgcccgaccgggcatttcgtatgtgcattcgtgactggcaatcgac

SEQ ID NO: 17479 - RNA, 138 nt, unidentified
  source 1..138: mol_type = other RNA; note = Related to LDJG01000003.1; note = Stenotrophomonas nitritireducens
taggcttttgccataccagcgactaggagtagctccggtctaaggtctggtccctagggcgttttatcaacttacgcatgcccggtcgcaggctaacgcccgaccgggcatttcgtttttgcagctctagccggtaat

SEQ ID NO: 17480 - RNA, 142 nt, unidentified
  source 1..142: mol_type = other RNA; note = Related to NZ_LNSU01000266.1; note = Xanthomonas translucens
taggattttcgcataccagcgactaggagtagctccagtctaatgtctggtccctagggcgtttcatcaacttacgcatgcccggtcgcaggctaacgcccgaccgggcatttcgtatgtgcggtcctggcccgtaatgggc

SEQ ID NO: 17481 - RNA, 145 nt, unidentified
  source 1..145: mol_type = other RNA; note = Related to AM920689.1; note = Xanthomonas campestris
tagagttttttcataccagcgactaggagtagctccggtctaatgtctggtccctagggcgtttcatttatttacgtgtgcccggtcgcaggctaacgcccgaccgggcatttcgtttgtgcagtcctagcaggtaatcggatac

SEQ ID NO: 17482 - RNA, 148 nt, unidentified
  source 1..148: mol_type = other RNA; note = Related to LOKH01000144.1; note = Xanthomonas campestris
tagggtttacgcataccagcgaccaggagtagctccggtagctccggtctaatgtctggtccctagggcgtttcatcaacttacgcatgcccggtcgcaggctgaagcccgaccgggcatttcgtatgtgcagtgtcggccatcaatc

SEQ ID NO: 17483 - RNA, 145 nt, unidentified
  source 1..145: mol_type = other RNA; note = Related to FPCI01000001.1; note = Pseudoxanthomonas sp.
taggtttaccccacaccagcgaccaggagtagctccggtctaatgcctggtccctacggcgttttatcaatttacgtatgcccggtcgaaggcccatgtccgaccgggcatttcgtatgcgcagttctcctcggcaatcggctac

SEQ ID NO: 17484 - RNA, 143 nt, unidentified
  source 1..143: mol_type = other RNA; note = Related to CP076254.1; note = Xanthomonas translucens
taggctttttccataccagcgactaggagtagctccagtctaatgtctggtccctagggcgttttatcaacttacgcatgcccggtcgcaggcttacgcccgaccgggcatttcgtatgtgcgctttagaaggggcaatcggc

SEQ ID NO: 17485 - RNA, 147 nt, Achromobacter sp.
  source 1..147: mol_type = other RNA; note = Related to NZ_FNYM01000002.1
taacctcttttcataccagcgactaggagtagctccagtctaatgtctggtccctagggcgatttatcacatttacgaatacccggtcgaggctcacacccggccgggtttttcgtatgtactttccgcgttcctatcgattagcga

SEQ ID NO: 17486 - RNA, 143 nt, Alcaligenes sp.
  source 1..143: mol_type = other RNA; note = Related to NZ_CP032153.1; note = Alcaligenes aquatilis
tagagtcaaagcataccagcgactaggagcagctccagtcaaacgtctggtccctagggcgttttattaaatttacgcatgcccggtcgatggcgaaagcccgaccgggcgtttcgtatctgccagtagttaagtgtctatca

SEQ ID NO: 17487 - RNA, 144 nt, unidentified
  source 1..144: mol_type = other RNA; note = Related to NZ_PKQQ01000003.1; note = Stenotrophomonas sp.
taggatttttgcataccagcgactaggagtagctccagtcaacagtctggtccctagggcgtttcatcaatttacgcatgcccggtcgcaggctcacgcccgaccgggcatttcgtttgtactctccgaaggcgctcgtggcga

SEQ ID NO: 17488 - RNA, 142 nt, unidentified
  source 1..142: mol_type = other RNA; note = Related to NZ_PKQP01000016.1; note = Stenotrophomonas bentonitica
taggattttttcataccagcgactaggagtagctccagtcaacagtctggtccctagggcgtttcattgatttacgcatgcccggtcgcaggctcaggcccgaccgggcatttcgtatgtgccgccccaagcgacaatcggc

SEQ ID NO: 17489 - RNA, 143 nt, unidentified
  source 1..143: mol_type = other RNA; note = Related to NZ_VLLB01000004.1; note = Massilia lurida
tagaatttttgcataccagcgactaggagcagctccggtctaatgtctggtccctagggcgatttatgaatttacgtgtgcccggtcgctggctagcgaccgggcatttcgtatttgggattcgatccgaagaggtcaacgcc

SEQ ID NO: 17490 - RNA, 144 nt, unidentified
  source 1..144: mol_type = other RNA; note = Related to SZUV01000002.1; note = Acidithiobacillus thiooxidans
tataatctttctacaccagcgactaggagtagctccggtcaaatgtctggtccctagggcgttttatcaacttacgtatgcccggtcgcaggcttatgcccgaccgggcatttcgtatgcgttacctacagactacaatcaact

SEQ ID NO: 17491 - RNA, 143 nt, unidentified
  source 1..143: mol_type = other RNA; note = Related to NZ_CP028901.1; note = Orrella marina
tacagtttttccataccagcgactaggagtagctccagtctaatgtctggtacctagggcgttttatcaacttacgcgtgcccggtcgaaggcttgtgctatgttcggccgggtatttcgtaaatgccaacgggctgcagtca

SEQ ID NO: 17492 - RNA, 146 nt, Pseudomonas sp.
  source 1..146: mol_type = other RNA; note = Related to CP053705.1; note = Pseudomonas aeruginosa
tatgcttttcttacaaaccagcgactaggagtagctccagtctaatgtctggtaggtagggcgttttatctaacttacgcatgcccggtcgcaggcttacgcccgaccgggcatttcgtatgcgttatttacaggatgtagacagc

SEQ ID NO: 17493 - RNA, 143 nt, unidentified
  source 1..143: mol_type = other RNA; note = Related to JADMJL010000080.1; note = Methyloversatilis discipulorum
tacgctttttctataccagcgactaggagtagctccggtctaatgtctggtccctagggcgttttatctacttacgcatgcccggccgcaggctaacgcccggccgggcgtttcgtatctgtcatttgcaggctgctattagt

SEQ ID NO: 17494 - RNA, 144 nt, unidentified
  source 1..144: mol_type = other RNA; note = Related to CP086344.1; note = Halomonas sp.
tactgtaaaaacataccagcgactaggagtagctccagtctaaagtctggtccctaggtggttttatccgcttacgtatgctcggtcaatggctttcgcctgaccgagcatttcgtatgtgcagaggaaagtacatatttatta

SEQ ID NO: 17495 - RNA, 147 nt, unidentified
  source 1..147: mol_type = other RNA; note = Related to NZ_JAKPBV010000013.1; note = Lysobacter sp.
tagcctgttgtcatgccagcgactaggagtagctccggtcaacagtctggcctctatggcgctttagcaacttacgtatgcccgacctcaaggcctcgtgccgggtcgggcatttcgtttgtgctccaatatccaccatgacagatc

SEQ ID NO: 17496 - RNA, 147 nt, unidentified
  source 1..147: mol_type = other RNA; note = Related to LPEM01000032.1; note = Burkholderia cepacia
tagaatgcattcatgccagcgactaggagtatcctccagtcccaagtctggcctctaccgggtctgcatccatttacgtgtgggcgattccttaatgctaaggagtcgcccatttcgtatgtgctttgcgtgtaagcactctccccc

SEQ ID NO: 17497 - RNA, 145 nt, unidentified
  source 1..145: mol_type = other RNA; note = Related to NZ_UWYX01000002.1; note = Burkholderia gladioli
tagaatgttcctatgccagcgactaggagtatcctccagtcccatgtctggcctctaccgggtctgcatccatttacgtgtgggcgattccttattattaaggagtcgcccatttcgtatgtgtattgcgtgcaagcgccccttc

SEQ ID NO: 17498 - RNA, 146 nt, unidentified
  source 1..146: mol_type = other RNA; note = Related to NZ_BBJH01000023.1; note = Paraburkholderia heleia
tatagtaggatcatgccagcgaccaggagtatcctccggtccgaagtctggcctctaccgggtctgcatatatttacgtgtgggcgacgccttaaatttaaggggtcgcccatttcgtatgtgcgcggcacggcgctccgtcctat

SEQ ID NO: 17499 - RNA, 146 nt, unidentified
  source 1..146: mol_type = other RNA; note = Related to VZQP01000011.1; note = Paraburkholderia sp.
tagaatggtgctatgtcagcgactaggagcatcctccggtctgaagtctggcctctaccgggtctgcatttacttacgtgtgggcgattccttagtgttaaggagtcgcccatttcgtatgtgctccgcgtgcaagctccgctctc

SEQ ID NO: 17500 - RNA, 144 nt, unidentified
  source 1..144: mol_type = other RNA; note = Related to NZ_JAAVUQ010000005.1; note = Caballeronia sp.
tacaatgcactcacgccagcgaccaggagtatcctccggtcaaacgtctggcctctacccggtctgcatccagttacgtgtgggcgattccttaaattaagggatcgcccatttcgtatgcgtttcgttcgcgggcaaatctcc

SEQ ID NO: 17501 - RNA, 146 nt, unidentified
  source 1..146: mol_type = other RNA; note = Related to NZ_CYGX02000017.1; note = Paraburkholderia ribeironis
tacaataaggttatgtcagcgaccaggagcattctccggtcatatgtctggcctctaccgggtctgcatccatttacgtgtgggcgattccttgatgacaaggagtcgcccatttcgtatgggcctcccggtcagtccggttcgcc

SEQ ID NO: 17502 - RNA, 143 nt, unidentified
  source 1..143: mol_type = other RNA; note = Related to NZ_CP045094.1; note = Burkholderia sp.
tagaataagaccatgccagcgactaggagtatctccagtcttaggtctggcctctaccgggtctgcatcaatgttacgtgtgggcgatttcttgatttcaaggagtcgcccatttcgtatgaaagtccaatcgtttcgaactg

SEQ ID NO: 17503 - RNA, 140 nt, unidentified
  source 1..140: mol_type = other RNA; note = Related to JAHYBY010000004.1; note = Janthinobacterium sp.
tataattagcacatgccagcgactaggagcatctccagtcacattgctggcctctagggtgttgtctatttacggttgtgcggtgcctttttgtgtggcaccgcacaatttgtaatttcagatattccgccctactccaa

SEQ ID NO: 17504 - RNA, 146 nt, unidentified
  source 1..146: mol_type = other RNA; note = Related to NZ_QUBS01000013.1; note = Trinickia diaoshuihuensis
taggctactgttatgccagcgactaggagtatctccagtcttatgtctggcctctcccggctctgcatccactttacgattgggcggtgcgcctctttgaggtcgccgcccaaattgtaaatgctgtcaaaaagcgagaccttctc

SEQ ID NO: 17505 - RNA, 145 nt, unidentified
  source 1..145: mol_type = other RNA; note = Related to JAJUBG010000007.1; note = Caballeronia sp.
tatgctctttgcatgccagcgactaggagcatctccggtctcaagtctggcctctcccggctctgcatccactttacgattgggcggtgcgcttcttcgaggccgccgcccaaattgtaactgctgccggcaacccccttctcgc

SEQ ID NO: 17506 - RNA, 159 nt, Pseudomonas sp.
  source 1..159: mol_type = other RNA; note = Related to JAEKFF010000008.1
tactatgcctctatgtcagtgactaggggtatctccagtcgttaagctgacctctagaggtcttgatccatgttacgtttgtatggcctccctgctaggttatcgtttgagcagggtggccatgcgaattgtaaagtttgctcccttccgcatcttctc

SEQ ID NO: 17507 - RNA, 157 nt, Pseudomonas sp.
  source 1..157: mol_type = other RNA; note = Related to NZ_UUGY01000017.1; note = Pseudomonas viridiflava
tagcctcaacctatgtcagtgactaggggtatctccagtcgttaagctgacctctagaggtcttgatcaatgttacatttgtgtggtctccctgttaaattttggtttaaacggggagaccatgcggattgtaaaatatatatattttgtttcactt

SEQ ID NO: 17508 - RNA, 160 nt, Pseudomonas sp.
  source 1..160: mol_type = other RNA; note = Related to NZ_JABWRD020000002.1; note = Pseudomonas shirazensis
taccatgaccccatgtcagtgactaggggtatcctccggtcaataagctgacctctagaggtcttgatccatgttacatttgtatggcctccctgctctgtagtcgtttgagtggggggccatgcagactgtaaacgcctctataagtcctctcctccgc

SEQ ID NO: 17509 - RNA, 160 nt, Pseudomonas sp.
  source 1..160: mol_type = other RNA; note = Related to CP047592.1; note = Pseudomonas aeruginosa
taccatgaccccatgtcagtgactaggggtatcctccagtcatcaagctgacctctagaggccttgatccatgttacatttgtatggcttccctcctcgttcaccatttgagttgggaagccatgcagactgtaaaatcccgtctcctctgcagctctcc

SEQ ID NO: 17510 - RNA, 152 nt, Pseudomonas sp.
  source 1..152: mol_type = other RNA; note = Related to NZ_JACYNP010000006.1; note = Pseudomonas lutea
tacgatcgctccatgtcagcgatttggggtatccccggtcgtaagctgacctctacaggacttgatccttgttacatttgtctacctcccgggtgcggttgtgcccgggaggtaggacaaactgtaaacaccgtactaccccctctaaatat

SEQ ID NO: 17511 - RNA, 147 nt, Pseudomonas fluorescens
  source 1..147: mol_type = other RNA; note = Related to NZ_CABVHI010000016.1
taggattgccgcatgtcagcgatttggggtatccccggtcgtaagctgacctctacaggacttgatccatgttacatttgtgtaccttcccaggttgctgggaaggctacacaaactgtaaatcctgctcctattaacaccttctac

SEQ ID NO: 17512 - RNA, 152 nt, Pseudomonas sp.
  source 1..152: mol_type = other RNA; note = Related to FNTC01000002.1; note = Pseudomonas jessenii
tagtatctgtggcatgtcagcgattggggaatcttccagtcgtatgctgacctctacaggccttgatccgtgttacatttgtgtgcctcctacgtactcagcgtcgggaggttacacaaactgtaagcctctccctcctatcctctcgtact

SEQ ID NO: 17513 - RNA, 153 nt, Pseudomonas sp.
  source 1..153: mol_type = other RNA; note = Related to NZ_CP052862.1
taggatctcttcatgtcagtgactaggagcatctccagtctcaagctgacctctaaaggcctgtatccgagttacttttgtgtgacttccccaatctgctgattgagggaagccgcacgaacagtaaaatttgcgttacccgtaacccccttc

SEQ ID NO: 17514 - RNA, 151 nt, Pseudomonas sp.
  source 1..151: mol_type = other RNA; note = Related to NZ_LT629777.1; note = Pseudomonas asplenii
tacgatctttgtatgtcagtgactaggagtatctccagtcgcaagctgacctctagaggcctgtatccgtgttacttttgtgtgacttccccattttcttgactggggaagccgcacgaatagtaaagcagcccttattttttctcccccc

SEQ ID NO: 17515 - RNA, 159 nt, Pseudomonas sp.
  source 1..159: mol_type = other RNA; note = Related to NZ_LT607553.1
tacgatcagttcatgtcagtgactaggagtatctccagtcgcaagctgacctctaaaggcctgtatccgatttacttttgtgtgaagccccctctgtctagctttggctaacggttgggggacacacaaatagtaaacttaagtcttaatccgaaatct

SEQ ID NO: 17516 - RNA, 141 nt, unidentified
  source 1..141: mol_type = other RNA; note = Related to NZ_CP089507.1; note = Luteimonas sp.
taccatcgggtcatgtcagcgaccaggagcatctccggtcaccagtctgacctctaggccgtttaattaactttacatttgcgcggtctgcatttggcaggccgcgcgaactgtaaaacaacagcctacttatgtgtctgc

SEQ ID NO: 17517 - RNA, 176 nt, Pseudomonas sp.
  source 1..176: mol_type = other RNA; note = Related to NZ_QPDS01000008.1; note = Pseudomonas cichorii
taccatcctgctcatgtcagcgactaggagtatctccagtcggtttggaatgctggcctctacaggtgtctagtctccgtcttacgtttgtgtaggtctatgctgggtctgggtgagtaactgactgcatagacctacacggatagtaaggagtcgtaataagcatcaatgagttc

SEQ ID NO: 17518 - RNA, 159 nt, Pseudomonas sp.
  source 1..159: mol_type = other RNA; note = Related to NZ_JACVHC010000006.1; note = Pseudomonas anatoliensis
tatagtctcttcatgccagtgactaggagtacctccagtcggtttggaatgctggcctctacaggtgtctagtctccgtcttacgtttgtgtgggttaatgctgagcaaaacggcattggcctacacagatagtaagggctatcaagtcccggttcagc

SEQ ID NO: 17519 - RNA, 171 nt, Pseudomonas sp.
  source 1..171: mol_type = other RNA; note = Related to NZ_CP023969.1
tatcatccacgcatgtcagtgactaggagtatctccggtcggtttgtaatgctggcctctacaggtgtctagtttccgtcttacgtttgtgtaggtttatgcttggtggaaatattctactaacataagcctacacagatagtaaggaacacttcctccgcctcccagcac

SEQ ID NO: 17520 - RNA, 161 nt, Pseudomonas sp.
  source 1..161: mol_type = other RNA; note = Related to RHQR01000004.1
tatgatcaggtcatgccagtgactaggagtatctccagtcggtttggaatgctggcctctacaggtgtctagtctccgtcttacgtttgtgtaggtttatgttgaaaacagcatatgcctgcacagatagtaaggagcaaaaattagattctccgtagctt

SEQ ID NO: 17521 - RNA, 159 nt, Pseudomonas sp.
  source 1..159: mol_type = other RNA; note = Related to JAEKED010000001.1
tatgatctgatgcatgtcagtgactaggagaatctccagtcggtttggaatactggcctctacaggtgtctagtctccgtcttacgtttgtgtagggttatgcagggtaagtaactgcataaccttgcacagatagtaaggagccctccagcagcacct

SEQ ID NO: 17522 - RNA, 153 nt, Pseudomonas sp.
  source 1..153: mol_type = other RNA; note = Related to LIHT01000076.1; note = Pseudomonas syringae
tatatttgcctcacgccagcgactaggagcagctccagtcaataatgttggcctctacaggtatctagtctccgtcttacgtttgtgcatgctgagtggtcgtaggccagtcagcatgcacggatagtaagggtaatatctctgacatcccgc

SEQ ID NO: 17523 - RNA, 156 nt, Pseudomonas sp.
  source 1..156: mol_type = other RNA; note = Related to PGRY01000001.1
tatagtcagtgcatgtcagcgactaggagcatctccagtcacaaatgctggcctctataggtgtctagtctccttcttacgctgcgaggggttcatttgaatatttttgaactcctcgcatgtagtaagcccaaaaagaactgctaactactttct

SEQ ID NO: 17524 - RNA, 164 nt, Pseudomonas sp.
  source 1..164: mol_type = other RNA; note = Related to CP017149.1; note = Pseudomonas aeruginosa
tatgatcaccttatgccaagactaggagcagctccagtcacaaatggcctctacagtcgtctagtctcctgtttacgtttgtgttgccctttaggctcggctcgggctcgatgcctaaagggcttcacaaatagtaaatccccgctccccgctccccgctcccc

SEQ ID NO: 17525 - RNA, 141 nt, unidentified
  source 1..141: mol_type = other RNA; note = Related to JAHTGR010000011.1; note = Duganella sp.
tagaatagcggcatgtcagcgactaggagcatctccagtcttgagcctgacctctatcgggtatgattaagttacgattgtgcgtgtcccaagttggggcacgcacatattgtaaatttttctccctatcactttccctcc

SEQ ID NO: 17526 - RNA, 154 nt, Pseudomonas sp.
  source 1..154: mol_type = other RNA; note = Related to LIRD01000002.1
tagagtcatcccatgccagtgactaggagcatctccagtcatcagatctggcctctacaggtatctagtctccgctttacatttgtgtgcctctctagcgaatggctaaagaggcacataaatagtaaatactcttgatcgatttctcttctcc

SEQ ID NO: 17527 - RNA, 153 nt, Pseudomonas sp.
  source 1..153: mol_type = other RNA; note = Related to NZ_MUNM01000090.1
tagagtcggcctatgccagtgactaggagtatctccagtcgccaaatctggcctctacaggtgtctagtctccgctttacgtttatgtgcctctctagcaaaaggctaaagaggcacataaatagtaaatatcttcttgattttcgctgctct

SEQ ID NO: 17528 - RNA, 155 nt, Pseudomonas sp.
  source 1..155: mol_type = other RNA; note = Related to AKJS01000163.1
tagagtcggtctatgccagtgactaggagtatctccagtcgccaaatctggcctctacaggtgtctagtctccgctttacgtttatgtgcctctctagcaataagctaatgaggcacataaatagtaaagatctccgttttatcctcctagctac

SEQ ID NO: 17529 - RNA, 153 nt, Pseudomonas sp.
  source 1..153: mol_type = other RNA; note = Related to NZ_FYEA01000001.1
tagagtccgactcatgccagtgactaggagcatctccagtcatcaaatctggcctctacaggtgtctagtctccttttacgtttgtgtgtctctctagcagtcagctaggaggcacacagatagtaaactctgcctttcaagcaggcgtattc

SEQ ID NO: 17530 - RNA, 150 nt, Pseudomonas sp.
  source 1..150: mol_type = other RNA; note = Related to NZ_CP062253.1; note = Pseudomonas gozinkensis
tacagtccgagtcatgccagtgactaggagcatctccagtcatcaaatctggcctctacaggtgtctagtctccttttacgtttgtgtgccttttagcgttgagctaagaggcacacaaatagtaaaacctcctacgcaagcagacagtt

SEQ ID NO: 17531 - RNA, 146 nt, Pseudomonas sp.
  source 1..146: mol_type = other RNA; note = Related to NZ_CP077087.1; note = Pseudomonas monsensis
tagagttcgactcatgccagtgactaggagcatctccagtcatcaaatctggcctctacaggtgtctagtctccttttacggttgtgtgcctctttagcgaaacgctaagaggcacacaaattgtaaactttgttttcttggttac

SEQ ID NO: 17532 - RNA, 154 nt, unidentified
  source 1..154: mol_type = other RNA; note = Related to NZ_MPIO01000005.1; note = Atopomonas hussainii
tatactgcatgcatgtcagcgactaggagcatctccagtcatcagcctgacctctagtcgcctttatctggttttactgttgtgtggctcgctagcgaaatcctctagcgagccacacaaatagtaaaaaatccagttttctgcttttgcatct

SEQ ID NO: 17533 - RNA, 148 nt, Pseudomonas sp.
  source 1..148: mol_type = other RNA; note = Related to NZ_JAHSTU010000002.1; note = Pseudomonas azerbaijanoccidens
tatcatttgggcatgtcagcgactaggagtatctccagtcattcagctggcctctacatgcctttagttatttactgttgtgtggttcccttctcaaatcgagggggagccacacgaatagtaaggcttgtactccatctagcagctc

SEQ ID NO: 17534 - RNA, 143 nt, Pseudomonas sp.
  source 1..143: mol_type = other RNA; note = Related to SCFF01000003.1
tatgatttaggtatgtcagcgactaggagcatctccagtcatccagctggcctctacaggtctatatccggttactgttgtgtggtcatcctatctttgggatggccacacgaatagtaatgtttattttgatgtcaagaatt

SEQ ID NO: 17535 - RNA, 150 nt, Pseudomonas sp.
  source 1..150: mol_type = other RNA; note = Related to NZ_CP039631.3; note = Pseudomonas veronii
tatcattggcgcatgtcggcgactaggagtatctccagtcactcagctgaccgctacaggcctttaattgtttactgttgtgtggtctttccattttttggtgggaaggccacacgaatagtaaggccgaaatggtatcaaaaacctttc

SEQ ID NO: 17536 - RNA, 134 nt, unidentified
  source 1..134: mol_type = other RNA; note = Related to JADMKF010000239.1; note = Aquabacterium sp.
tacactatacgcatgtcaacgactaggagcatctccagtcagctatgttgacctctaggccgtctgatctacttgtgtggcgcccccttgcggggcgccacacaagacgtagaacgaaacggacgacgcccgcc

SEQ ID NO: 17537 - RNA, 146 nt, unidentified
  source 1..146: mol_type = other RNA; note = Related to NZ_FOKN01000013.1; note = Delftia tsuruhatensis
tacactatacccatgtcaacgaccaggagcatctccggtcgctagtcactgactaaagttgacctctaggccgtctgatctacttgtgtggcgtactgttcagtacgccacacaagctgtagagtccactcagacccgcgcccccc

SEQ ID NO: 17538 - RNA, 142 nt, unidentified
  source 1..142: mol_type = other RNA; note = Related to NZ_SZVI01000009.1; note = Rhodoferax sp.
tagactatacgcatgtcagctgactaggagcatctccagtcataaggctgacctctaggccgtctgatctacttgtgtggcgtgctcggtttaccgagcacgccacacaaggcgtagaggctctttctccatcatttatcat

SEQ ID NO: 17539 - RNA, 141 nt, unidentified
  source 1..141: mol_type = other RNA; note = Related to NZ_BADL01000521.1; note = Ideonella sp.
taaaatgcgccccatgtcagctgactaggagcatctccagtcgtttaggctgacctctaggccgtctgatctacttgtgtggcgcgcttggtaatgtccaagccgccacacaagacgtagagcgatggtctccttcgcggt

SEQ ID NO: 17540 - RNA, 138 nt, unidentified
  source 1..138: mol_type = other RNA; note = Related to JACUZW010000001.1; note = Comamonas sp.
taaaattgaccccatgtcagctgactaggagcatctccagtcatataggctgacctctaggccgtctgatctacttgtgtggtgagcttacgccaagctcgccacacaaggcgtagaagatcaacgtctcagatccga

SEQ ID NO: 17541 - RNA, 139 nt, unidentified
  source 1..139: mol_type = other RNA; note = Related to JAEQNE010000002.1; note = Ramlibacter monticola
tacaattcgcacatgccagcgaccaggagtatctccggtcacacgtgctggcctctacggcgtctggatctacttgtgtggtgagccttcgtggctcccacacaagatgtagaagccgccaacatctctgctgtcttcc

SEQ ID NO: 17542 - RNA, 143 nt, unidentified
  source 1..143: mol_type = other RNA; note = Related to CP039287.1; note = Cupriavidus necator
tatactagcaaaatgccagccgactaggagtagctccagtcacataggctggcctctaggccgtctgatctacttgtgtggcgtgcccatgtcaatgggccgccacacagggcgtagattcctcctctcttccccccgatttt

SEQ ID NO: 17543 - RNA, 152 nt, unidentified
  source 1..152: mol_type = other RNA; note = Related to CP035708.1; note = Sphaerotilus natans
tagcatagcttcatgctggctgactaggagtatctccggtcgcacaggccagcctctaggccgtctgaatctacttgtgtgatgcgcttgacccagggtgagccgggacaggtgctcacacaaggcgtagatcggtacatcagcgcaacaat

SEQ ID NO: 17544 - RNA, 151 nt, unidentified
  source 1..151: mol_type = other RNA; note = Related to NZ_JPOQ01000093.1; note = Proposed Ferrovum myxofaciens
tatagtgaccaaatgctggctgactaggagtatctccggtcgcaaaggccagcctctaggccgtctgattctactgcgtgtgcccccccgtgtacaggacttctgtacacggtgggggcacacgcaggatatagattgcaccatacttcct

SEQ ID NO: 17545 - RNA, 135 nt, unidentified
  source 1..135: mol_type = other RNA; note = Related to JACORU010000006.1; note = Ramlibacter sp.
tacaatagcgtcatgccagcgactaggagcatctccggtcataaacgttggcctctgaggcgtctgaatctacttgtgtggagaccacaggtctccacacaaggcgtagagttctagaggcttcgaacgggtgcc

SEQ ID NO: 17546 - RNA, 143 nt, unidentified
  source 1..143: mol_type = other RNA; note = Related to VSWE01000008.1; note = Herbaspirillum sp.
tataatcgcggcatgtcagtgactaggagtagctccagtcattctgctgacctctaggccgtctgattctaccaatttggttgcggggcttgaatcatattcaagccccgcaatagtagattcgcaaatcctccttctcctct

SEQ ID NO: 17547 - RNA, 146 nt, unidentified
  source 1..146: mol_type = other RNA; note = Related to NZ_KV880769.1; note = Herbaspirillum camelliae
tataatcgcgccatgtcagtgactaggagtagctccagtcattctgctgacctctaggccgtctgattctaccaatttagttgcgtggcttgaaacttctcaagccacgcaatagtagaactccagatattcaggccttaaaaatc

SEQ ID NO: 17548 - RNA, 146 nt, unidentified
  source 1..146: mol_type = other RNA; note = Related to NZ_SDQC01000001.1; note = Pusillimonas soli
tataattgagttatgtcagtgactaggagtagctccagtcattttgctgacctctaggccgtctaattctacctaacttggttgcgtggcttgaatttgattcgagccacgcaatagtagatccaacaaacaaaatttcagattgc

SEQ ID NO: 17549 - RNA, 146 nt, Chromobacterium sp.
  source 1..146: mol_type = other RNA; note = Related to JAGKRE010000004.1; note = Chromobacterium violaceum
tatactaccatcatgtcagtgactaggagcatctccagtcgttatgctgacctctaggccgtctgattctaccaaattgattgcgtggtctgaaaccgatgttcagaccacgcaatagtagatatcccagatttgccgccaatccc

SEQ ID NO: 17550 - RNA, 153 nt, unidentified
  source 1..153: mol_type = other RNA; note = Related to NZ_JAGSPN010000010.1; note = Undibacterium luofuense
taggattaacgtatgtcagtgactaggagtagctccagtcgaaatgctgacctctccgccgtctgattctaccaaatttggttgcgtggcttaaattaattaacatttaagccacgcaatagtagattcccctcccgcagccaagctatatct

SEQ ID NO: 17551 - RNA, 136 nt, Vibrio parahaemolyticus
  source 1..136: mol_type = other RNA; note = Related to NNGJ01000068.1
tattatctagtcatgccggagactaggagtagctccagtcgttaactggcctctacctgagattataaatgttactaatgcacgtacattcgcaagaatgtcgtgcattttgtaattttggcctttggaaagctta

SEQ ID NO: 17552 - RNA, 134 nt, unidentified
  source 1..134: mol_type = other RNA; note = Related to MAJX01000042.1; note = Aliivibrio fischeri
tactatttaatcatgccggagactaggagtagctccagtcgctaactggcctctacctgagattataaattttactaatgcacgtacatttatgaaaatgacgtgcattttgtaattttgtcgtacggaaaact

SEQ ID NO: 17553 - RNA, 141 nt, Vibrio sp.
  source 1..141: mol_type = other RNA; note = Related to NZ_LNQW01000024.1; note = Vibrio jasicida
taacctattagtatgctagagactaggagtagctccagtcgttaactagcctctacctgcgtttaggtatgttacttgtgcacgtttcctttacaaaagggcgtgcattttgtaattctagcctctagaaactcatactgc

SEQ ID NO: 17554 - RNA, 137 nt, Vibrio sp.
  source 1..137: mol_type = other RNA; note = Related to CAOA01000134.1; note = Vibrio nigripulchritudo
tataatcagggcatgccggagactaggagtagctccagtcactaactggcctctacctgcgtttaggtgtgttactagtgcacgttccttcattggacgtgcattttgtaattttgggggacagaaaactaagatca

SEQ ID NO: 17555 - RNA, 153 nt, unidentified
  source 1..153: mol_type = other RNA; note = Related to NC_018012.1; note = Thiocystis violascens
taaactcaaagaatgctagcgactaggagcatctccagtcattcacgctagcctctacccggtgctgatctacttttgagtttgtgcgcccctctgacaatttgcagacggggcgcacaaatcgtagacatgcctctgctgtcggtctagtcg

SEQ ID NO: 17556 - RNA, 151 nt, unidentified
  source 1..151: mol_type = other RNA; note = Related to NZ_CP014222.1; note = Janthinobacterium sp.
tagtatcgagtcatgctagggactaggagtatctccagtcactaaacctagcctctagggcgctatatttagttacgtttgtgtgtactagcaatgcttcgttgcagctagtacacgcttttcgtaatattctaaaattctcgatcgtgta

SEQ ID NO: 17557 - RNA, 156 nt, unidentified
  source 1..156: mol_type = other RNA; note = Related to NZ_CP081150.1; note = Deefgea sp.
tattattgcactatgccaaggactaggagcatctccagtcgttagtcttggcctctactgcgctatagttagtttacgtcaggtgtgtgttatcaatgatctttcatcactggtaacacacaccagatacgtaaaaactcaatgccacttccccta

SEQ ID NO: 17558 - RNA, 160 nt, unidentified
  source 1..160: mol_type = other RNA; note = Related to JACJDS010000010.1; note = Pseudoalteromonas sp.
taaattgtcaacatacctagcgactaggagcatctccagtcattatgcaaggtcactacaagctatgaattatgttacccttacaccttattcctcgtctaagataagattgagtatagggtgtaagattgtaactttacttgtaactatctctagttaa

SEQ ID NO: 17559 - RNA, 149 nt, unidentified
  source 1..149: mol_type = other RNA; note = Related to LAZL01000002.1; note = Catenovulum maritimum
tatatttagtggcatacctagcgactaggagcatctccagtcagtatgcaaggtcactacaggctatgagtcatgttacccttacgccaattcgcctatctgtgtattggcgtaagaatgtaacctaccccttccttttcctttcagaa

SEQ ID NO: 17560 - RNA, 142 nt, unidentified
  source 1..142: mol_type = other RNA; note = Related to LKDV01000028.1; note = Pseudoalteromonas sp.
tatcattagttcataccatgcgactaggagtatctccagtcattatgcaaggtcactacaggctatgagtcatgttacatccgtgttggtactgatatttcagtccacacggaatagtaacagctaagttttttgaacataa

SEQ ID NO: 17561 - RNA, 146 nt, unidentified
  source 1..146: mol_type = other RNA; note = Related to NZ_QNQN01000070.1; note = Pseudoalteromonas sp.
tatcctaaacacataccatgcgactaggagcatctccggtcattttgcaaggtcactacaggctatgagtcatgttacgtccgtgtagatactctttgtgagttctacgcggaatagtaactctttctattactatcatttatcag

SEQ ID NO: 17562 - RNA, 152 nt, Vibrio sp.
  source 1..152: mol_type = other RNA; note = Related to JAATOR010000004.1; note = Vibrio diazotrophicus
tatctttgatacatacctagcgactaggagcatctccagtcaatatgcaggtccctacaggctataattaatgttacccttacgccgattgctcactagataccagcatttggcgtaagattgtaactctctactatcctcacgtcatccca

SEQ ID NO: 17563 - RNA, 154 nt, unidentified
  source 1..154: mol_type = other RNA; note = Related to NZ_RSEJ01000003.1; note = Photobacterium alginatilyticum
tatcttatggttatacctggtgactaggagtatctccagtcattatgctaggtccctacaggctataattaatgttgcccttacgtcatttactgtctaacaagttagtaaatgacgtaagaatgtaacctctatcttacgcttacgctcccac

SEQ ID NO: 17564 - RNA, 163 nt, unidentified
  source 1..163: mol_type = other RNA; note = Related to JADWMP020000001.1; note = Shewanella sp.
tagattcgacccatacctcgcgactaggagcatctccagtcattaagcaggtcactacgggtcatgaaccattttactgaatgcactcgtatcttgattaagtgctattacttattcagatacagtgcatgaaagtaagccaattcctcgaactattcagtgt

SEQ ID NO: 17565 - RNA, 155 nt, unidentified
  source 1..155: mol_type = other RNA; note = Related to CP027188.1; note = Idiomarina sp.
tatcataatcacatacccagcgactaggagtatctccagtcattatgcagggtccctacaggctatgagtcaatgttaccttgcgttactctttacgctcatttaaaagcataaagtgtagcgcaagctagtaactcgattagccgcgacaaccc

SEQ ID NO: 17566 - RNA, 163 nt, unidentified
  source 1..163: mol_type = other RNA; note = Related to NZ_JAJEWQ010000006.1; note = Planctobacterium marinum
tagattataaatataccagcgcgactaggagcatctccagtcacaaaggcgcaggtcactacgggctatgatgaatgttacccttgcaccattgttgatgttaactaccgttattaacacaacatggtgtaagcaagtaacccggccttcagtaaactcccaa

SEQ ID NO: 17567 - RNA, 140 nt, unidentified
  source 1..140: mol_type = other RNA; note = Related to BMQW01000002.1; note = Shewanella ulleungensis
tatgatctgtttatacctagcgactaggagtatctccagtcatcacgcaaggtcactacctgctgttattaatgttacgaccacatggcaagtgattgttatgtggtcaagtaacctcactctcagcactctcagcactc

SEQ ID NO: 17568 - RNA, 155 nt, unidentified
  source 1..155: mol_type = other RNA; note = Related to CP031769.1; note = Salinimonas sediminis
tatattatatgcataccttcgactaggagcatctccagtcacaaatgaaggtccctacgagctatgagtcatattacaactgcgctacgatgttttgggaatcaaaatattcgtagcgcaagtatgtaatgcaaactgtcgtaagtttacttctc

SEQ ID NO: 17569 - RNA, 148 nt, Vibrio sp.
  source 1..148: mol_type = other RNA; note = Related to DACQGG010000011.1; note = Vibrio vulnificus
tagaataactacatacctcgcgactaggagcatctccagtcattaagcgaggtccctacaggccatgagtcatgttaccctcatccttagctcactctcatagagttaaggatgagattgtaacccccccccccacccccacacctat

SEQ ID NO: 17570 - RNA, 142 nt, unidentified
  source 1..142: mol_type = other RNA; note = Related to JAAEYZ010000024.1; note = Vibrionaceae bacterium
taatataatgacataccacgcgactaggagcatctccagtcattaggcgaggtcactacaggccatgagtcatgttaccctcaccctgacctcataacgagtaagggtgagattgtaacctatttgcccgtcccccttctcc

SEQ ID NO: 17571 - RNA, 149 nt, Vibrio parahaemolyticus
  source 1..149: mol_type = other RNA; note = Related to JWSV02000003.1
taaaataaacgtataccacgcgactaggagtatctccagtcattaggcgaggtccctacaggccatgagtcatgttaccctcaccttgttctcatttttaatgagtcagggtgagattgtaaccacaccataaaccatgacatatccat

SEQ ID NO: 17572 - RNA, 144 nt, unidentified
  source 1..144: mol_type = other RNA; note = Related to NZ_LVDX01000004.1; note = Shewanella algae
taatcttcgaccataccacgcgactaggagtatctccggtcatatagcgaggtcactacaggctgtcatttatgttactcccacatccgagcactaaactcagatgtggggttagtaaccatctctcctcaagcccatctggtt

SEQ ID NO: 17573 - RNA, 139 nt, Vibrio sp.
  source 1..139: mol_type = other RNA; note = Related to NZ_CP091185.1; note = Vibrio anguillarum
tattatgtacgtaaccttgcgactaggagtatctccagtctttgagctaggtccctacaagccatgataaatgttaccctccgtgcaaaattaacattttgtgcggagattgtaaccaattctctgttcgttctgatct

SEQ ID NO: 17574 - RNA, 142 nt, Vibrio sp.
  source 1..142: mol_type = other RNA; note = Related to AAXNPA010000001.1; note = Vibrio cholerae
tatcatttactcatacctcacgactagaagcatcttcagtcactatgtgaggtccctacaggccatgagtcatgttaccttcctttcttctctctctagggggaaaggaagaatgtaaccttctaactttacctcttccctc

SEQ ID NO: 17575 - RNA, 127 nt, unidentified
  source 1..127: mol_type = other RNA; note = Related to JABXGE010000012.1; note = Raoultella terrigena
tattattaaaaaataccttgcgactaggagcatctccagtcactatgcaaggtccctacaggccatgattcatgttaccctccccctacgggggaggattgtaaccttctgattttcataacactta

SEQ ID NO: 17576 - RNA, 149 nt, unidentified
  source 1..149: mol_type = other RNA; note = Related to NZ_CP034660.1; note = Colwellia sp.
taatatttatacataccttgcgactaggagaatctccagtcaaaaatgtaaggtccctagccgttattattaagttacttgaagcgcagacataagattataattcttatactgcgcttttttgtaatccctactatgtatatagtctt

SEQ ID NO: 17577 - RNA, 156 nt, unidentified
  source 1..156: mol_type = other RNA; note = Related to NZ_CP041170.1; note = Alteromonas mediterranea
tatactatgtacatacctcgtgactagaagtaacttcagtcaaaaaattcgaggtcactaccggctatgattcagttactcttcactggggtgatttaaatgtttttaagttacctcagtgttaagtagtaaacctcatgaatcaaactaacgttt

SEQ ID NO: 17578 - RNA, 145 nt, unidentified
  source 1..145: mol_type = other RNA; note = Related to CP033381.1; note = Methylomonas sp.
tatactcagaaccatgctagtgactaggagtatctccagtcataaatactagcctctacctgcgtttagcctaatttatcttgcccgaactctttcagagacgggcaagttgaaatttgaggaacaatgccttttggtatagttc

SEQ ID NO: 17579 - RNA, 145 nt, unidentified
  source 1..145: mol_type = other RNA; note = Related to NZ_CP022129.1; note = Methylovulum psychrotolerans
tacacttaacagtatgctagtgactaggagtatctccagtcataaatactagccgctacctccgtttagcctaatttatcttgcccgaactctttcagagacgggcaagttgaaatttgacgaacattgcgatctggtgtcgttc

SEQ ID NO: 17580 - RNA, 161 nt, unidentified
  source 1..161: mol_type = other RNA; note = Related to MGYX01000019.1; note = Gammaproteobacteria bacterium RIFCSPLOWO2_12_FULL_47_76
tacattatctctatgctagcgactaggagtatctccagtcacatgtctagcctctacgggctataagccataattcatcttgtcctctaccctacgttccatgaattagcatggagtggggtagggcaagttgtatttttaaagtatagagttttactcaa

SEQ ID NO: 17581 - RNA, 148 nt, unidentified
  source 1..148: mol_type = other RNA; note = Related to JACUUH010000036.1; note = Gammaproteobacteria bacterium
tagcattcattacatgtcagcgactaggagtatctccagtcttcgtatactgacctctagtggttttaattcataatttgttttgtctttcccttaaggttctagggaaagacaaaatataatgacagtgactttattcaattgaaaa

SEQ ID NO: 17582 - RNA, 152 nt, unidentified
  source 1..152: mol_type = other RNA; note = Related to PJBZ01000069.1; note = Psychromonas sp.
taaaattaaggtcgctgaccgactaggagtatctccagtcatttgagttagcctctaaaagtaattagatatgtttcatcttgtctatcacacaatttttatgatgtgtgatagagcaagttgtaacctcaatatttaattagattagacga

SEQ ID NO: 17583 - RNA, 150 nt, unidentified
  source 1..150: mol_type = other RNA; note = Related to NZ_WTKU01000003.1; note = Psychromonas sp.
tataatatatttttgctgaccgactaggagtatctccagtcatctgagttagcctctaaaagtgattagaaatgtttaaccttgcctatccgcaactatataaaaatggccatggataggcaaagttgtaaatataatgttttaattagt

SEQ ID NO: 17584 - RNA, 146 nt, unidentified
  source 1..146: mol_type = other RNA; note = Related to JACUUF010000373.1; note = Methyloprofundus sp.
tataataaacccaacccagtgactagaggtatcctcggtctggcttcggcggctggtgagcagtggtttatagtatttataaaaaagccttggcaatttgttttgtcagggcttttttattggtgttataaacccaatcagttagc

SEQ ID NO: 17585 - RNA, 150 nt, Escherichia coli
  source 1..150: mol_type = other RNA; note = Related to CP028745.1
taaagtgtttttatgccaacgactaggagcatctccagtcataaatgttggcctctacaggcctttatatagtgttgctcttgtactgccttctctttcgagagaaggtatgtacaagaagtaaagcctgcgaagggagggtgtctgggg

SEQ ID NO: 17586 - RNA, 150 nt, Enterobacter sp.
  source 1..150: mol_type = other RNA; note = Related to NZ_CP006580.1; note = Enterobacter ludwigii
taaagtagctttatgccaacgactaggagtatctccagtcattaatgttggcctctacaggccttgatttagtgttgctcttgtactgccttctctcccgggggaaggtatgtacaagaagtaaggcctgtaaaagggagggtgtctggg

SEQ ID NO: 17587 - RNA, 155 nt, unidentified
  source 1..155: mol_type = other RNA; note = Related to NC_014562.1; note = Pantoea vagans
taaagtatctttatgccaacgactaggagaatctccagtcaaaaatgttggcctctacaagcctttatatagtgttgctcttgtactaccttcttctttgatatttgaagaaggtatgtacaagaagtaagggttttctacagctacagctacag

SEQ ID NO: 17588 - RNA, 149 nt, unidentified
  source 1..149: mol_type = other RNA; note = Related to NZ_CQDT01000017.1; note = Yersinia frederiksenii
tacgctaaattcatgctgacgactaggagtatctccagtcaccaatgtcggcctctacaagcctttaggtacgttactcttatgtcatcctcttcagcctgaagaggatgatgtaggtagtaaaaaaatacacaaactgtatgagtgat

SEQ ID NO: 17589 - RNA, 151 nt, unidentified
  source 1..151: mol_type = other RNA; note = Related to NZ_JXSK01000013.1; note = Photorhabdus luminescens
tatatttaacccatgctagcgactaggagtatctccagtcagcaatgttagcctctacgagcctttatgtaatgttactcttgtactgcccttcttcataaacctgaaaagggtatgtacaggtagtaaatttcaaagagaacgagccttt

SEQ ID NO: 17590 - RNA, 155 nt, Pseudomonas sp.
  source 1..155: mol_type = other RNA; note = Related to NZ_LR733826.1
taaaatgagggcatgtcagcgactaggagtagctccagtcaacagtctgacctctaggcgcctttatcctttttacgtttgtaccgctcttcttgatgcaaggcataagaagagcggtacaaatagtaaaaaacctcctcggcacctagcagcac

SEQ ID NO: 17591 - RNA, 150 nt, unidentified
  source 1..150: mol_type = other RNA; note = Related to NZ_JAJOYU010000011.1; note = Proposed Pararheinheimera soli
cataataatttcatgcttctgaccttggagcatctccggtcaatcaggaagcctctataggcagtatagtctcgtaaattactaaggctcccgttaagcaattatcgggggccttaataatttacaagacacgtaaaggtgcttcagtca

SEQ ID NO: 17592 - RNA, 151 nt, unidentified
  source 1..151: mol_type = other RNA; note = Related to CP048043.1; note = Serratia liquefaciens
cataataaccacatgcttctgaccttggagtatctccggtcaaacaggaagcctctataggcagtatagtctcgtaaattattaaggcccccgttaagcaattatcgggggccttaataattttcagataacgaaaaggcacttcagtcaa

SEQ ID NO: 17593 - RNA, 149 nt, unidentified
  source 1..149: mol_type = other RNA; note = Related to FWGN01000003.1; note = Klebsiella pneumoniae
cataatgacattatgcttctgacttggagtatctccggtcaaccaggaagcctctataggcagtatagtcaggtttattactaaggcccccgttaagcaattatcgggggccttagtaatttctgggccccagcaaggccttctgaccc

SEQ ID NO: 17594 - RNA, 148 nt, Escherichia sp.
  source 1..148: mol_type = other RNA; note = Related to LR134270.1; note = Escherichia marmotae
cataatgagcctatgcttctgacttggagtatctccggtcaaacaggaagcctctataggcagtatagtctcgtaaattattaaggctcccgtgaagtgattcttgggggccttaataatttatggggccgcaggtgcttcagtacat

SEQ ID NO: 17595 - RNA, 151 nt, unidentified
  source 1..151: mol_type = other RNA; note = Related to NITI01000005.1; note = Cronobacter sakazakii
cataatcagtacatgcttctgacttggagcatctccagtcaatcaggaagcctctataggcagtataaggtcttgtaaaattattaaggctcccgtaaagttcttgcgggagccttaataatttcatatatccgcaaaagggtttcagcac

SEQ ID NO: 17596 - RNA, 153 nt, Escherichia coli
  source 1..153: mol_type = other RNA; note = Related to NZ_ADJG01000004.1
catcatgtatgtatgcttctggcttggagtatctccagtcaaacagggagcctctacaggcagtatagttatgttaattacaaaggccctgagtgataaaaattactcagggcctttgtaatttctaacatacaaaataacagtggatgctga

SEQ ID NO: 17597 - RNA, 144 nt, Escherichia coli
  source 1..144: mol_type = other RNA; note = Related to ABBXOP010000094.1
gataatgaatccatactcttgactagtgagatatctccagtctaaaagagagtccctaaaggcagtatagttttaaattagaaaaggcggagagaaatctccgccttttctaatttaaaacagggagaggatgttttgaaaata

SEQ ID NO: 17598 - RNA, 145 nt, Proteus sp.
  source 1..145: mol_type = other RNA; note = Related to CP021694.1; note = Proteus mirabilis
tataatataaccatactcctgactagcgagttatctccagtcataaagggagtccctaaaggcagtataaatatattagaaagggtgaagagagattcttcaccctttctaatatatagggggaaagaatatgaaattagaggaa

SEQ ID NO: 17599 - RNA, 151 nt, unidentified
  source 1..151: mol_type = other RNA; note = Related to ALIV01000029.1; note = Pectobacterium atrosepticum
tattgtattcttatgtcgtctgactagtgggcattccccagtcacaatagacggcctctacaggcaattagttacgttacatgcccatcagcaaaaggtacaaaagcctacttgttgatgggctttgtaattttaatggctttgacattct

SEQ ID NO: 17600 - RNA, 161 nt, Enterobacter sp.
  source 1..161: mol_type = other RNA; note = Related to CP029126.1; note = Enterobacter hormaechei
taagatgatgttatgccgtctgactagtgggcattccccagtcatgatagacggcctctacaggcaattagtaacgttacaacccctcaatatagatggtgtcaataaaacaccggtaattgaggggttttgtaattatatccattaaaaagtttacgtat

SEQ ID NO: 17601 - RNA, 160 nt, Escherichia sp.
  source 1..160: mol_type = other RNA; note = Related to NZ_CP042942.1; note = Escherichia fergusonii
tataaattgatcatgtcgtctgactagcgagtattctccagtcacagtagacggcctctacaggctattaagtacgttactgcccccttagatcgttcttctctacgaagctactgtttaagggggctttgtatttctaattcactatacctgactgccc

SEQ ID NO: 17602 - RNA, 158 nt, unidentified
  source 1..158: mol_type = other RNA; note = Related to CP096258.1; note = Providencia rettgeri
tatactcattgcatgccgtgactagtgagaatctccggtcagcgaacggcctctacaggcattaagatatcttgcaataccgcttcataacttgtaattaattgaaaaattacacacttatgaggcggtttttgtatgtctatccaaccttaccctct

SEQ ID NO: 17603 - RNA, 165 nt, unidentified
  source 1..165: mol_type = other RNA; note = Related to NC_012880.1; note = Musicola paradisiaca
tatactaaatccatgccgtgactagtgagaatctccggtcaattgacaacggcctctacaggctttaatgcacttacaatgccgcttcgcttactcgtagttagttgaaaaacctacgatgtaacgaggcggtttttgtatgtatcataccagctacccatacat

SEQ ID NO: 17604 - RNA, 146 nt, unidentified
  source 1..146: mol_type = other RNA; note = Related to NZ_CPWN01000004.1; note = Yersinia frederiksenii
taaagtaatttcatgccaacagactaggagtatctccagtcaatagtgttggcctctacaggcaattattcaatgttgcacttgtgtattccccctcaatgggggatacacaagatgtaaagaggtataacttggcaaatctaaac

SEQ ID NO: 17605 - RNA, 145 nt, unidentified
  source 1..145: mol_type = other RNA; note = Related to PYNG01000071.1; note = Photobacterium kishitanii
taagattatacacagctagcgactaggagtagctccagtcacaataactagcatttatagattacttataaatttaatttacagttgcatgaagtctttaattaggcttcatgcagtatgtaatcttatccctttcccttccctt

SEQ ID NO: 17606 - RNA, 149 nt, unidentified
  source 1..149: mol_type = other RNA; note = Related to QGLM01000007.1; note = Frischella perrara
tattctacgaatatgccagtgactaggggtatctccagtcgataagctggcctctactggtccatcagatacatttactggtgcggtttaatttagtattaaccaagttataccgcatattgtaaatttctatatcaatttaacttatc

SEQ ID NO: 17607 - RNA, 147 nt, Aeromonas sp.
  source 1..147: mol_type = other RNA; note = Related to CP077210.1
taacgtctgcatcactggtgactaggagtaactccagtcgttaagccagtccctaggcgtcattacctgatttctttcttccccccctctttactatgctgagaggggaagggaagattgaaagtataaatacccttcagttttccc

SEQ ID NO: 17608 - RNA, 154 nt, Aeromonas sp.
  source 1..154: mol_type = other RNA; note = Related to JAEHHQ010000003.1; note = Aeromonas veronii
aacgttagctccactggtgactaggagtaactccagtcggtaagccagtccctaggggtcattacctgatttcattcctccctcccctcctgtttttcacattggcagagaggggaagggaagattgaaaataatcgcacatcgcacatcgcac

SEQ ID NO: 17609 - RNA, 160 nt, Aeromonas sp.
  source 1..160: mol_type = other RNA; note = Related to NZ_MVPS01000007.1; note = Aeromonas veronii
gataatttcgaaatactagtgactaggagtatctccggtcaatccaaaggatacgtccaatggataagctagtccctaggggtcattacctggtttcttttatctctcccctcatgaatgagggggggatatttgaaattatctatttatcttgcccctc

SEQ ID NO: 17610 - RNA, 134 nt, unidentified
  source 1..134: mol_type = other RNA; note = Related to SIHL01000004.1; note = Alteromonas sp.
tatacttaagttcaccagtgactaggagaagctccagtcacaaagctggtccctaggagtcattataaaatttcactgttacgcccctcttttggggcgttcagatgaaaattgcgacttgttttataaacatc

SEQ ID NO: 17611 - RNA, 135 nt, unidentified
  source 1..135: mol_type = other RNA; note = Related to NZ_CP074570.1; note = Paraneptunicella aestuarii
tataatggcggttaccagtgactaggagaagctccggtcggaaagctggtccctaggagccataatttgatttcgctgtccatcccttccaattgaggaagggggatagttgaaaagattgtgttttttctccac

SEQ ID NO: 17612 - RNA, 137 nt, unidentified
  source 1..137: mol_type = other RNA; note = Related to NMRX01000072.1; note = Methylococcaceae bacterium CS5
tataatacaaagaccggtgactaggagtatctccagtcgtaatgctggtcactacttgccttcagctatttcttctggtcactttgtctatgatagacagggtggtcgattgaagaattttctcctccctacctccc

SEQ ID NO: 17613 - RNA, 139 nt, unidentified
  source 1..139: mol_type = other RNA; note = Related to QNFQ01000482.1; note = Gammaproteobacteria bacterium
tataatcaaggctactggtgactaggagtatctccagtcgtaaagctggtccctatcggtctggatttaatttctctgtctgcccttcccaacacggggggcaggtagctgaaaagttctcatattgccaatatatccc

SEQ ID NO: 17614 - RNA, 134 nt, unidentified
  source 1..134: mol_type = other RNA; note = Related to NZ_JOKH01000004.1; note = Endozoicomonas numazuensis
tatacttgtttttaccagtgactaggagtagctccagtcgtaaagctggtccctagtggcctacatgtcatttcttctacgaccctcttcagagggtcagtggttgaaaactcttttactagcttttggttttt

SEQ ID NO: 17615 - RNA, 133 nt, unidentified
  source 1..133: mol_type = other RNA; note = Related to LT841305.1; note = Acidithiobacillus ferrivorans
tacactagctctaccagtgactaggagtatctccagtcgttgagctggtccctacctgcctttatgcaatttcttcaacctgctccctctgtgggtgcaggtagttgaaaatcccagccgaccagtggaatcg

SEQ ID NO: 17616 - RNA, 140 nt, unidentified
  source 1..140: mol_type = other RNA; note = Related to NVXL01000289.1; note = Alteromonadaceae bacterium
tacaatagacctactggcgactagaggtatcctcagtcacgaagccggtcactagaggtctttagttatttctctggctgctcccccagttttctgggtgagcaggtagttgaaaaagagccctccgcctaccgatctgt

SEQ ID NO: 17617 - RNA, 150 nt, unidentified
  source 1..150: mol_type = other RNA; note = Related to NZ_CP019628.1; note = Pseudoalteromonas aliena
tataatggaatgactggcgactcggagtatctccagtcaacatgctggtccctaaatgcctataggtatgtttcttctgttgcctttgtcaacgattcggttcggcaaaggcaactagttgaaataagtctctagagtctttcgccttgc

SEQ ID NO: 17618 - RNA, 130 nt, unidentified
  source 1..130: mol_type = other RNA; note = Related to JAFLKV010000025.1; note = Sulfuricurvum sp.
tataattgcttttatgattgagtgacttgaagtatcttcagtctaaatgcttaatcctctaaggtgctttatttactaatgcaagggcattatttgccctttgtaaaaggtgctcagtgactcaaacctc

SEQ ID NO: 17619 - RNA, 129 nt, unidentified
  source 1..129: mol_type = other RNA; note = Related to JAJPEU010000001.1; note = Sulfurovum sp.
tatacttataccatgattaagtgactagaggtatcctcggtcatattagcttaatcctctaaagtgcaatattactgtgactaagccctttaaagggcttatgtaaaggtaaaaatttgaataaaactt

SEQ ID NO: 17620 - RNA, 142 nt, unidentified
  source 1..142: mol_type = other RNA; note = Related to FXLF01000023.1; note = Candidatus Thioglobus sp.
taaaataactttaggctaaatgactagaagcaccttcagtcatataaactatttagcctctaagcggttattactaattttaaatgcctaattttgattcatcgaaattgggcattttaaaaaataccagccaatcaaatga

SEQ ID NO: 17621 - RNA, 156 nt, unidentified
  source 1..156: mol_type = other RNA; note = Related to JACCHT010000001.1; note = Candidatus Thiodubiliella endoseptemdiera
tataatataaccacgctaaatgactagaagtatcttcagtctaattcactccaaaggagaatttagcctctaagcggttattattaattttaaaatgcctggttttgattctatcaaaactgggcattttaaaaaatgccaactaatttataatgc

SEQ ID NO: 17622 - RNA, 149 nt, unidentified
  source 1..149: mol_type = other RNA; note = Related to VCHC01000138.1; note = Gammaproteobacteria bacterium
cactcacgctaaatgactagatgcatcatcagtcaatttaaaatttagcctctaagcggttatcattcatttttcacatcctcaatactttgattattttcaatcaaagcactggatgtgaaaaaacgctacctaatttatgacaaaaa

SEQ ID NO: 17623 - RNA, 213 nt, unidentified
  source 1..213: mol_type = other RNA; note = Related to NZ_AP024849.1; note = Clostridium sp.
tggagtttatccaaccttagcagttaaggtagttgaaagcacaaaatattgtaaaattattatcggctaccgccgataatatgagagtgaaaatttactattttgcgcagcaagaacagctggttctagctacaaaaatagtaaattttcggtgagttacaaagaataattttagtaggattcctcccaatagtaggtgaaatatgaagtatt

SEQ ID NO: 17624 - RNA, 213 nt, unidentified
  source 1..213: mol_type = other RNA; note = Related to JAHHUY010000039.1; note = Clostridium tyrobutyricum
ggcattcagccaaccttagaagttaaggtagttgtaaatacaaaattgtaaaattattatcggactaccgccgatatatatgagagtgaaaatttcatattttattaagatagaacaaactggttctatctacaaaaatatgaaattttacgatgatttactaataataattttagtaggattcctcttaaaggtgatgaataattatgcaat

SEQ ID NO: 17625 - RNA, 216 nt, unidentified
  source 1..216: mol_type = other RNA; note = Related to SWQT01000003.1; note = Clostridium botulinum
ggcacagaaatatgccaccttagctgttaaggtaatagaaagcacaaaatagaaaaattattatcggactaccgccgatgggatgagagtgaaaatttaatattttacgtagttataacatgctggttataacaacaaaaatataaaattttctatgatttatcaaggaataattttagtaggattcctcattaataggtaggtgtaatatgaaat

SEQ ID NO: 17626 - RNA, 206 nt, unidentified
  source 1..206: mol_type = other RNA; note = Related to UFXA01000002.1; note = Clostridium perfringens
tatacaaccttagcagttaaggtataagtagatacaattttcgtaaaattattatcggctaccaccgataggatgagagtgaaaattaaatattttaaatagctatcacaagctagttctagctataaaagatttaattttctagtgatttataaagaataattttagtaagattcctctaattataggtaggtgcaatatgaaat

SEQ ID NO: 17627 - RNA, 196 nt, unidentified
  source 1..196: mol_type = other RNA; note = Related to CP014223.1; note = Anaerotignum propionicum
ggctctatgccacctcagcattctgaggttaatgaaatcacaatcttgaaaaatttgaatttgatgcctcaaatatttgagaatttaatttatcggccagaacgacttgttctggaccttacaaaatcaaattcttttgtgactaactttaacaaatttttgtgggacactttttatggaggatgtataatggaat

SEQ ID NO: 17628 - RNA, 218 nt, unidentified
  source 1..218: mol_type = other RNA; note = Related to JAASHB010000001.1; note = Paeniclostridium sordellii
gacattttgtcgccttagcactctaaggataatgaaattacaattttgtaaaatttgaattgactctgtcaatatttttgaaagttaaattattaaaaatttatgttacaatcatctagaattgataacagaaatttttaataattaattgatctatttattataacttaatcaaattttagtagggtttcttttttatggaggaaataaattgaaat

SEQ ID NO: 17629 - RNA, 210 nt, unidentified
  source 1..210: mol_type = other RNA; note = Related to AAXVUS010000010.1; note = Clostridioides difficile
gacacattgtcaccttagcattctaaggttagtgaaactacaaaattgtaaaatttgaattgactcagtcaatatttttgaaagttgattctttaaaattagcaaactcaactagctagattgagattcgccaattttaaagaatctaaaagcttaattttatcaaattttagtggggtttctttttttgggaggaaatatgattaaata

SEQ ID NO: 17630 - RNA, 209 nt, unidentified
  source 1..209: mol_type = other RNA; note = Related to NZ_FMMP01000006.1; note = Cellulosilyticum sp.
gactatatgtcaccttaacattttaaggtaatagtaataacaaaagaatgctcaatttgtatttgctacgcgcataattttgacgataaattatttcaatttcttcactcttgtacttacaaggagcaaagaaatcaaaacaatttacaaaacaaatatttcaaatttcagtagggttcctttttcttaggaggataaatgaatataca

SEQ ID NO: 17631 - RNA, 219 nt, unidentified
  source 1..219: mol_type = other RNA; note = Related to NZ_JACOOV010000022.1; note = Blautia sp.
gacttatttgtcaccttagcttttaaggttaatataattacaaaatagtaaaatttgaattgattccatcaatgattttgagtggataagaaaaattttaaattgctcactatctgggttcaaattgaaaatttttcttattagatcaatttgtcaaataaaatatatcaaattttagtaggatttcccttgattttatgagggaaaaatgtataggtt

SEQ ID NO: 17632 - RNA, 226 nt, unidentified
  source 1..226: mol_type = other RNA; note = Related to CP042243.1; note = Crassaminicella thermophila
ggctatttgccaccttagcttttaaggttaaagcaatgacaatttgttaaatttgaattgactccgtcaatatttttgatgatgtaattaaatttattgcacaaccgttttggctcactgactcagctcgccaaaagaacgcacaataaatttaattacatgtcaataaatttaatcaaatttaagtagggtttctttttttagttgggaagtgataaattggata

SEQ ID NO: 17633 - RNA, 227 nt, unidentified
  source 1..227: mol_type = other RNA; note = Related to NZ_QUEQ01000010.1; note = Ruminococcus sp.
agcctttggcttcctcagcgtttgaggataaagtagttaaaatttggttaaatttgttcgactacgtcgatgttttgagacaagtcaatttattctaagaacctatcaacgtcggcaaacttgccgccattgatagaacctcagaataaatcaacttgtatacaaataattgttaccaaatttaagtaggatcctttttttgtggagaaaagatgaaacaatacatt

SEQ ID NO: 17634 - RNA, 226 nt, unidentified
  source 1..226: mol_type = other RNA; note = Related to FMEB01000016.1; note = Roseburia sp.
agctttttgctccctcagcgtttgaggataaggtaattaaaatttggttaaatttgttcgactgcgtcgatgttttgtgacaagtcaatttattctgagaacctacgaatgtcggcaagcttgccgccattagtagaaccccagaataaatcaacttggttacaaagaactgttaccaaatttaagtaggatccttttttgtggagaaaaaatgaaacgatatatt

SEQ ID NO: 17635 - RNA, 227 nt, unidentified
  source 1..227: mol_type = other RNA; note = Related to JAGZZD010000009.1; note = Roseburia sp.
ggctttttgccacctcagcgtttgaggttaaagcaatataaatttggttaaatttggtcgacgatgtcgatgtttggtttaaaagtaaatttattatatgaaccttcttatttcggcaaccttgcctcaataagaagaaccccataataaattttctttttgcaaagaattatttccaaatttaagtaggatcctttttttatggagaaaaaatgaaacgatacata

SEQ ID NO: 17636 - RNA, 251 nt, unidentified
  source 1..251: mol_type = other RNA; note = Related to JAFQBJ010000029.1; note = Agathobacter sp.
ggcttttgtgccgcctcagcgtatgaggttaaagcaatgagatttggttaaatttggcttgacagacgtcaaatctttggagtaaaagatttgaatttgctgagaacccacgtctacagccacgcttggctgttgacgtagaacctcaccaaattcaaacttttaggcaataaattcttaccaaatttaagtagggtccttttttgttacatttttttaagaaaagagtacggaagatgaaaaaatatatt

SEQ ID NO: 17637 - RNA, 225 nt, unidentified
  source 1..225: mol_type = other RNA; note = Related to NZ_MJHW01000008.1; note = Roseburia sp.
ggcataaatgccaccttaacattttaaggtagatgtatttagaaattagttaaatttgtatgactaccgtcatatttcagatttcaatttcattggttgttcacaaccatgaccttcgctactacgctcaggtcagaacgcaaacaaccaatgaaattgactcagaaaaaatttaacaaatttaagtaggattcctttttttatggagaaaactatgtataaatt

SEQ ID NO: 17638 - RNA, 226 nt, unidentified
  source 1..226: mol_type = other RNA; note = Related to NZ_JADMQW010000015.1; note = Intestinimonas butyriciproducens
ggcatactgccgccttagctattaaggttgatgtaactacattctgttgaatttggaatggcttccagccatgctgtgtagccagaaagaaagtaaaatcagaacctcggccctcgcgaacttcgctcacgccgagaacccgctttcactttcttcctgttcaaagaattgtaccaaattcaagtggagttctttatttataacagacgggggtatagcatgctta

SEQ ID NO: 17639 - RNA, 227 nt, unidentified
  source 1..227: mol_type = other RNA; note = Related to RKGG01000020.1; note = Clostridiales bacterium
ggttaataaccgccttagcttttaaggttaatgtaactacaaaatgttgaatttaaaatgaccttcggtcatatttatattcaaacaaaaacatatcatcaacaacctgacattcgcgaacttcgctcatgttcagaacgccgctgatatgttttcatttgttcaaagaatttataataaattcaagtggagtcctccactgttttcaatggtggtgaatataagtt

SEQ ID NO: 17640 - RNA, 222 nt, unidentified
  source 1..222: mol_type = other RNA; note = Related to DNFS01000014.1; note = Ruminococcus sp.
ggcattactgccaccttagctattaaggttaatgtaactacatttcgttgaatttggatgacatcctgtcatctttagttaaggaagaaaatagcatcaccaaccgcttggtcgcgggactccgctcccggcgagaacgctgatactattttccaccttttcaatgaattgtaccaaattcaagtggggttctttttatttggggttaaatagttatgatat

SEQ ID NO: 17641 - RNA, 226 nt, unidentified
  source 1..226: mol_type = other RNA; note = Related to JAGAMN010000013.1; note = Oscillospiraceae bacterium
ggcgttatgccgccttagcagttaaggttgacgtatcataaatgagttgaatttggatggctgtccagccatgctgtattataagcaataaaacagcatcaacaaccatcgggctccgcggctccgctccgcccgagaacgccgctgctgttttattccttttcaataaattctaacaaattcaagtggagtcctttttctacgatcaggagggtgacgttgtgta

SEQ ID NO: 17642 - RNA, 223 nt, unidentified
  source 1..223: mol_type = other RNA; note = Related to FMXS01000006.1; note = Ruminococcaceae bacterium FB2012
ggtattttatgccgccttagcttttaaggttaacgcatctacaatttgttgaatttggatgacgtcccgtcatattttgatgggacagaaaagaaaagagaaaacctcaccgctcgcgagctacgctcacggtgagaactcctcttttctttcagtcctgcaatgaattgtaccaaattcaagtggagttctttttattttgaggtggaatatccaatgagaa

SEQ ID NO: 17643 - RNA, 225 nt, unidentified
  source 1..225: mol_type = other RNA; note = Related to QPZU01000011.1; note = Clostridium botulinum
ggtgtaaagccacctcagcatttgaggttaagaatttacaatttgttaaattttgaatgactccagtcatttttctgatagatttgaattattataggcacaaccttttataagctaagcttagctcataaaagaacgcaccaataataatacaaatctacaataaattgtatcaaaatctaagtaggattctttttttattttggaggataatatgcaagaata

SEQ ID NO: 17644 - RNA, 254 nt, Bacillus sp.
  source 1..254: mol_type = other RNA; note = Related to LJIT01000071.1; note = Bacillus cereus
ggctcaagtgccaccttagctgataaggtagttgtatctacaattagttgtgttaagacaactaatcgttaagtttttattgactgccgtcaataactttgtttacaatgctaagtatttattataaccatgtaaattcgctacttcgctcattcacagaacataataaatacttagattgttacaaacaattaattaaaaatttaagtaggattccctcctatttttttaatgtaggtgatattggatgaaaa

SEQ ID NO: 17645 - RNA, 242 nt, Bacillus sp.
  source 1..242: mol_type = other RNA; note = Related to NVJL01000019.1; note = Bacillus toyonensis
agcgtaaatgctgccttagctgttaaggttgttttaattacaatttgctccattgttaaattttccattgactaccgtcaattgtttggagctacaattctaattatttattataaccgtgcgaattcgctactacgctcattcacagaacataataaaaaattagattgtatcaaataatttttcgaaaatttaagtaagattccctttttatttctaaaataggtggtatgtgatgaata

SEQ ID NO: 17646 - RNA, 235 nt, unidentified
  source 1..235: mol_type = other RNA; note = Related to NZ_JAIVKS010000001.1; note = Priestia aryabhattai
agcgtatttgctgccttagctgttaaggttgttgtagttacaataaagatcggttaaatttttattgactgccgtcaatatttttgttggcaatatatttatttattataaccgtgtggattcgctacttcgcttatccacagaacataataaagaaatatatcgcttcaaacaattatttgaaaatttaagtaggattccctttatttttgaaataggtgatgttatatgaaag

SEQ ID NO: 17647 - RNA, 229 nt, unidentified
  source 1..229: mol_type = other RNA; note = Related to NZ_VEEP01000002.1; note = Cytobacillus oceanisediminis
agcttaggctgccttagctgctaaggttagtgtaatttaatttagttaaatttttattgactaccgtcaattcttttggtctgcaaacatatttctttattataaccatgggaattcgcaactcagctcattcccagaacataataaagaaatattttgctccaaataaatatttaaaaatttaagtaggattccttttcttttttaaaaaaggtgataatgatgaaaa

SEQ ID NO: 17648 - RNA, 234 nt, Bacillus sp.
  source 1..234: mol_type = other RNA; note = Related to LR134328.1
aacttttttaaagttgccttagcgtctaaggttacagcaataacaaaatgttaaatttccattgactatcgtcaatattgtgtagttttttattttaattctttacaaccgtgtgactacgcaaatctttgctccgtcacagaacgtaaataattaaaataaaaagtcaatgaattttttaggaaatttaagtagggctcctcctaatgattaaaggagagataaaagagtggg

SEQ ID NO: 17649 - RNA, 225 nt, Bacillus sp.
  source 1..225: mol_type = other RNA; note = Related to NUQK01000037.1; note = Bacillus wiedmannii
agcttttagctaccttagcgtttaaggttaatgcattgagaaaatgttaaattttcaagacttgcgtcttaattgtgagaaatgcattttcattttccataaccatgagcctacgcaaatctttgctccggctcagaacatgaaaaaggaaaaagcatatgcaataaatttattggaaaatttaagtagggctctttttatcgttggaggttaaagacttgaata

SEQ ID NO: 17650 - RNA, 233 nt, Bacillus sp.
  source 1..233: mol_type = other RNA; note = Related to NUNG01000033.1; note = Bacillus thuringiensis
tacctttttaggtaaccttaaaggttaaggttaaagtagctagattaggaaaaaaatgatgaacgacgccgttcattgttttcgaggatactttcgattattccggcctcccttgcagaagcaatctttgcttccactgcggtcaaccgaactaatcgaaagtatgtccaataaaatcattttcatttttttgtagggcttttttttcatttggaggtattatataatgagtt

SEQ ID NO: 17651 - RNA, 232 nt, Bacillus sp.
  source 1..232: mol_type = other RNA; note = Related to NZ_CP085511.1; note = Bacillus cereus
tacctttttaggtaaccttaaaggttaaggttaaagtagttagattaggaaaaaaatgatgaacgacgccgttcattgttttcgatgatgctgtcgattattccggcctcccttgcagaagcaatctttgcttccacttcggtcaaccgaaataatcgaaagcatgtccaataaaatcattttcatttttttgtagggctttttttcaattggaggtattatataatgagtt

SEQ ID NO: 17652 - RNA, 228 nt, unidentified
  source 1..228: mol_type = other RNA; note = Related to QXJM01000039.1; note = Cohnella faecalis
taccgttaaggtaaccttaaagtttaaggtaaatgtatctagaattgaaaaaaatgaggagctcgcgctcactgttttcgaggatactatcaattagtccggtctccattgcagaagcaatctttgcttccgctgcagtcaaccggcctaatcgacagtattgtcaataaaatcattctcattttttgtagggcttttttttatccttggaggtatctataatgagtt

SEQ ID NO: 17653 - RNA, 227 nt, Bacillus sp.
  source 1..227: mol_type = other RNA; note = Related to NZ_AEHM01000023.1; note = Bacillus subtilis
taccgttatggtaaccttaaagtttaaggttaaagtatttagatttaagaaaaaatgaggaacgaggccgttcattgttttctgggatacttccgattattccgtccggcctagcagaagcaaactttgcttccgcgtcgtccagccgaactaatcaaaagtattttcaaataaatcattatcattttttgtagggcttttcctattggaggattacatgaagtttt

SEQ ID NO: 17654 - RNA, 232 nt, unidentified
  source 1..232: mol_type = other RNA; note = Related to JAFHKR010000035.1; note = Fictibacillus nanhaiensis
catgtacacagttaccttagcgtctaaggttgagacaatcacaaaatgtaaaaatattcagaacttgcgttcattgttttacaagaatgcaattaattttataacaaccgctcgcttacgcaatctttgctccagctcggaacgctataaaattaataacatttacaatgaaattcatgaatatttttagtagggctctttttatttattttgggggtaaatttattgtatg

SEQ ID NO: 17655 - RNA, 229 nt, Bacillus sp.
  source 1..229: mol_type = other RNA; note = Related to FMJM01000007.1; note = Bacillus cereus
aacagttaccttagcggttaaggttttgataactacaaaatgaaaaaatgttctgaacttgcgttcaatgttttacaagaatgcttttaatttttataacaaccgctcgcttccgcaatctttgctccagctcggaacgttataaaaattaaagagcatttacaataaaattcatgaacatttttagtaggactctttttattttttgggggttatgttgcaatggata

SEQ ID NO: 17656 - RNA, 232 nt, unidentified
  source 1..232: mol_type = other RNA; note = Related to JAJJZD010000002.1; note = Thalassospira sp.
atcttttggtgatgccttatagtataaggttggattcctaagaattaggaaaaaatgaggaacgtgggagttcagtagtttgagcgcaccgcgtttataaataagtgtcgctcgaattcgcaatctttgctcattcgttcgcttacacttatttataatcttgtgaacaataaaattttactcattttttgtagagctttatttactataattaaggagattcaaatggata

SEQ ID NO: 17657 - RNA, 238 nt, unidentified
  source 1..238: mol_type = other RNA; note = Related to NZ_VEEI01000002.1; note = Lysinibacillus fusiformis
tttaagaccttagctgttaaggttaatacatctagaaaatgtaatattgttcggcacgttacgtgcctgatttgcttggtaaacttttaatttttaaagaaccgcacgttttcgcaagctatgctcaaacgaggaacctttaaaaactaaaagtactccaataaaattcaagaacaatattacaaaatatttattttgtagggctcttcttatctgtggaggagaattatgattaata

SEQ ID NO: 17658 - RNA, 263 nt, Streptococcus sp.
  source 1..263: mol_type = other RNA; note = Related to FR873482.1; note = Streptococcus salivarius
aacatatcatgttatttcctttggtagttccaaaggttgagtattttaaaaatagtaaaatttgatactcgactttgtcgaggatagtaataaattactatataaaatagaattacgaaaggtagtacgtagaacctttagacatacggcgaactcgccgcaagtcgtcaagaacccacgtactacctttcgttctcaatgaaagtctctacaaattttaggtagggctctttttatatggagcaatgatgagtaaatatata

SEQ ID NO: 17659 - RNA, 241 nt, Streptococcus sp.
  source 1..241: mol_type = other RNA; note = Related to NZ_VMMH01000009.1
aacatatcttgttatttcctttggtagttccaaaggttgagtattttaaaaatagtaaaatttgttactcgactttgtcgagaatagatagttcaattacgaaacgtcgcacctagaacctctagactcacggcgaactcgccgtaagtcgtcgagaacctacgttctccatttcgtaacaagtaaagcttctacaaattttagtagggctctttttatgtggagtgtttatggaaaagta

SEQ ID NO: 17660 - RNA, 174 nt, unidentified
  source 1..174: mol_type = other RNA; note = Related to NC_022549.1; note = Paracholeplasma sp.
gagccctagtaattagatgctggaatcggcaccttggtttgtgtagatcaaactttgcgaattacgttagtaacacggcgtgcgaactattaaaactgtcattcttaaaactgcagacagtttcaagaatgccaatttcaacatttcgcactaactttttaagtagggctctcc

SEQ ID NO: 17661 - RNA, 165 nt, unidentified
  source 1..165: mol_type = other RNA; note = Related to VOWY01000007.1; note = Collinsella sp.
taaggtcgcagcgatatctattaccgtcatattgaggtgtccgccgttaaggatggactagagatatcatttaccctttcgtgcttggacgatttccgttctctcgtccttcaccggggggttcaggacgagagaacggaaatcgcccaaacagtgcggccttat

SEQ ID NO: 17662 - RNA, 165 nt, unidentified
  source 1..165: mol_type = other RNA; note = Related to QSBV01000001.1; note = Collinsella sp.
caaggccgcagctagtcattgattgccccgattggagcgagtcctctgttaaagatggactgagacgtttttaccaattttggtccgtgcatatggtcattccatagccacggacccgaatccgtgtctacggaatgaccatatgcacggactgtgcggccttgt

SEQ ID NO: 17663 - RNA, 157 nt, unidentified
  source 1..157: mol_type = other RNA; note = Related to JABLXJ010000013.1; note = Firmicutes bacterium
gagggcactagttttagggtcattttgcatagggcgtggccgtgtgccgggcgttaagccaggccgttgaattgatagacttgtggccgcgcggaagtccctcgtctaccctctcgggtagccaaggtccttccgcgcggctcttgtagtgccctcg

SEQ ID NO: 17664 - RNA, 158 nt, unidentified
  source 1..158: mol_type = other RNA; note = Related to SVEQ01000005.1; note = Lachnospiraceae bacterium
agggattctagttttaatataagagttttgctctttttctctgagttgagttcagagaaagttttattgttggtattcgggcgagatttatcactcgcaagaataccagtattcttgcaagcaataaatctcgcttgcgctttaatgtagaatccctt

SEQ ID NO: 17665 - RNA, 162 nt, unidentified
  source 1..162: mol_type = other RNA; note = Related to QVFD01000002.1; note = Coprococcus catus
agagattctagtattaatctaaaggcctatggcctttggttctctgagttgagttcagagaatgaaagattgctgacattcgtggcgagttaaaggactcgaaccgatgccagcattggttcgagtcctttaactcgcttccggtttaatgtagagtctctt

SEQ ID NO: 17666 - RNA, 165 nt, unidentified
  source 1..165: mol_type = other RNA; note = Related to JAFTQC010000025.1; note = Clostridia bacterium
agagattctagttttaatctataaagcaatttgcgtttatagtccttagagttgagttcagaggatggaaaattgtaagtcaatcgtgcaaagtttaatcaaatatggctcgcacacgacccatatccgcttaaactttgcctgcggcttaatgtagaatctctc

SEQ ID NO: 17667 - RNA, 175 nt, unidentified
  source 1..175: mol_type = other RNA; note = Related to JACSRA010000017.1; note = Clostridium sp.
gagaattctagatttaatcgataatatagtagtattatctatatattatcttctctgagtagatgtgcagagaaagttttgtttttgtccattcttgtaataaaattacaagagatttattccagaataaatcacttgaaatcttattacaatgaggattaatgtagagttctct

SEQ ID NO: 17668 - RNA, 153 nt, unidentified
  source 1..153: mol_type = other RNA; note = Related to NZ_CP022106.1; note = Halobacillus halophilus
agggtttctggggatttatgtcacttatactaacatatttgccttgtgtaagcagggttggcagaattgtgtggcttggcttgcatatagtttcactcgcagctcttgctcagagctactcgtaaaactatatgcagcatagcagaaaccctt

SEQ ID NO: 17669 - RNA, 155 nt, unidentified
  source 1..155: mol_type = other RNA; note = Related to JAFRUO010000020.1; note = Clostridia bacterium
agaatacttagtgaaaatatatcacagtaatgtgttatagtgccttatgtaaaatagggtcggtttctttggggctcttacaagcagttgctacacaacgcttgtaatcctcattacaagcgttgcgtaccaactgcttttatgtaagtattctt

SEQ ID NO: 17670 - RNA, 141 nt, unidentified
  source 1..141: mol_type = other RNA; note = Related to JAGBXM010000051.1; note = Clostridia bacterium
ttttatatatcacttttttatgtgttatagtgccttatgttaaatagggtcagttattttggggcgattacaagctgttgctattaacggcttgtaatctcttacatgccgttaatatcagcagcttttgtaagtgttctc

SEQ ID NO: 17671 - RNA, 155 nt, unidentified
  source 1..155: mol_type = other RNA; note = Related to JAGAZX010000174.1; note = Oscillospiraceae bacterium
agaatgcttagaaattttatatcacagaaatgtgttatagtgccttatgttaattagggtctgttactttggggctcttacaagcagttgctgcgccacgcttgtaatccccattacaagcgcagcgcatcaactgcttcatggtaagtgttctc

SEQ ID NO: 17672 - RNA, 155 nt, unidentified
  source 1..155: mol_type = other RNA; note = Related to JAFRDB010000067.1; note = Clostridia bacterium
aaagtacttagtaagatatatcacaaaatgtgtatatagtgccttgtgttaaatagggtcagatgaattggggcgattacaagccgttgctacaaactgcttgtaatcctcattacaagcagtttgcatcaacggcttagtgtgtaagtacttta

SEQ ID NO: 17673 - RNA, 155 nt, unidentified
  source 1..155: mol_type = other RNA; note = Related to JAFTXX010000014.1; note = Clostridia bacterium
agaatgcttagtatttttatatcacagaaatgtggtcataagtgccttatgttaaatagggtcggatcttttggggctcttacaagcagttgctgcgcacgcttgtaatcctcattacaagcgcacgcatcaactgcttagcggtaagtgttctc

SEQ ID NO: 17674 - RNA, 156 nt, unidentified
  source 1..156: mol_type = other RNA; note = Related to FMGM01000006.1; note = Clostridium sp.
gaaatacttagtaaattatatggcttagaaagtcgtattgtgctttgtgttaaacagagccagaagaattgtgaggattacaagcagttgctgcgtcacgcttgtaatttctcattacaagcgcgccgcagcaactgcttagttgtaagtatttcc

SEQ ID NO: 17675 - RNA, 156 nt, unidentified
  source 1..156: mol_type = other RNA; note = Related to QUIJ01000008.1; note = Butyricicoccus sp.
ggaatgcttagtaaaaagaatatggcgtttttgtcgtattgtgccttgtgttaaatagggccagttagattgtcaggattacaagcagttgctgtggcacgcttgtaatcctcattaaaagcgtaccacagcaactgcttatctgtaagtattcca

SEQ ID NO: 17676 - RNA, 156 nt, unidentified
  source 1..156: mol_type = other RNA; note = Related to NZ_PDCG01000001.1; note = Bifidobacterium aemilianum
tgagcacctagttttttgggtaattggttcgtgaattcaattacctctatgcgtaagcatggacgaaagattgctggtcctttgagtgatgtttgtcctcaacggaacgagcggtcgactccggtgatgacaaacatcactcaagtaggtgctcac

SEQ ID NO: 17677 - RNA, 185 nt, Aeromonas sp.
  source 1..185: mol_type = other RNA; note = Related to NZ_JAACNB010000003.1; note = Aeromonas veronii
catgatattcttaaaaagatctctacatcgatagcttagaggaaccctgcttgcaaggttgatattatcatatcctagcctcctcatcggctaatctgtggcgtctcggcgcgtggcacttttagtgcacgacaagttcgtgaaaagatgaattagtatcaatataggatcaagatgaaaaagta

SEQ ID NO: 17678 - RNA, 185 nt, Aeromonas sp.
  source 1..185: mol_type = other RNA; note = Related to JADPIC010000001.1; note = Aeromonas dhakensis
tatgatattcttaaaaagatctctacatcgatagcttagagggaccttgcttgcaaggtcgatatcattatatcctagcctccacatcggctaatctgtggcgtctcggcgcgttgcacttttattgcacgacaagttcgtgaaaagatgaattagtatcaatatgggatcaagatgaaaaagta

SEQ ID NO: 17679 - RNA, 186 nt, Aeromonas hydrophila
  source 1..186: mol_type = other RNA; note = Related to NZ_AP023398.1
catgatatccttaagaagatttctatatcgatagcttagaggggtcttgttcgcaagattgatattactatatcctagcctcaacattagctaacttgtggcgcatccgccatgatgcacttttagtgcacgacaagttcgtgaaaagatgaattagtatcaatataggatcagaatgaaaagcta

SEQ ID NO: 17680 - RNA, 187 nt, Vibrio sp.
  source 1..187: mol_type = other RNA; note = Related to SZQJ01000005.1
agtgatatacttaggaagatttcttcatcgatagtatagagaggctttgttcgcaaagcagatgctttatgtatcccagtctcaacattgtctaatcccgcgcatccaggttgtgatgtacttttactgcacgacaagttcgtgaaaagatgaattagtatctatgtggaatctgtatgaaaaatta

SEQ ID NO: 17681 - RNA, 186 nt, unidentified
  source 1..186: mol_type = other RNA; note = Related to MUEZ01000005.1; note = Salinivibrio sp.
gatgatatactggaaaagatttcagaatcgatagtttagagagtgtttgttcgcaaattcgatatttttatatcctagtctcaatattgtctaaatggtgtgcacctttcaaatgtgtacttttaatacacgacaagttcgtgaaaagatgaattagtatctatatggaatcaaaatgaaaagtta

SEQ ID NO: 17682 - RNA, 186 nt, Vibrio sp.
  source 1..186: mol_type = other RNA; note = Related to NZ_LAUM01000014.1
gatgatatacttaagaagatttcagtatcgatagtttagagagtttttgctcgcaaattcgatatttttatatcctagtctcaacattgtctgactctgtgcatccctgtgtaggtgtacttttaatgcacgacaagttcgtgaaaagatgaattagtatccatgtggaatcataatgaaaaatta

SEQ ID NO: 17683 - RNA, 186 nt, unidentified
  source 1..186: mol_type = other RNA; note = Related to MSCJ01000001.1; note = Photobacterium angustum
catgatatacttaagacgatttcagattcgatagattagagaagcagtgcttgcaatgctgatatctttatatcctagtctcaacattgtcttaatctgtgcatccctcgcagatgtacttttaatgcacgacaagttcgtgaaaagatgaattagtatcaattatggaatcaaaatgaaaaatta

SEQ ID NO: 17684 - RNA, 186 nt, Vibrio sp.
  source 1..186: mol_type = other RNA; note = Related to ABBKDM010000016.1; note = Vibrio vulnificus
tatagtacaatcaaggaggtatcttcttcgatagactaatggggttccgttcgcgggatgaagcctggagcttcctagcctagtatgtgctagttctgtgcaactgtgctactagttgtacttttgaggcacgtaaacgtgaaaagacgttctttgtatccaagaagagattactatgaaaaaata

SEQ ID NO: 17685 - RNA, 186 nt, Vibrio sp.
  source 1..186: mol_type = other RNA; note = Related to AIDA02000097.1; note = Vibrio cyclitrophicus
tatagtacaatagaagagatttcatcttcgatagaataatggatctcgcttgcgagatggagcctggagctccctagcctaatatgtgcttgttctgtgcatccgtatcactagtggtacttttaaggcacgtaaacgtgaaaagacgttctttgtatcgtaagaagagattgttatgaaaaagta

SEQ ID NO: 17686 - RNA, 185 nt, Vibrio sp.
  source 1..185: mol_type = other RNA; note = Related to CP071059.1; note = Vibrio alginolyticus
tatagtacaatagaagaagtttcttcttcgatagactaatgggtctcgcttgcgagatgaagcctggagcttcctagcctaatatgtgcttgtcctgcgcatccgtatcgctaatggtacttttaaggcacgtaaacgtgaaaagacgttctttgtatccaagaagagattattatgaaaaaata

SEQ ID NO: 17687 - RNA, 193 nt, Pseudomonas sp.
  source 1..193: mol_type = other RNA; note = Related to NZ_JABUYN010000001.1
tacagtataatatcagaaatttcttcttcgatagattaagggaatttgctgatagtttatagtaaatgaagcctagtgcttcctagtcccattatgtgctagtagtccatccgtattcctggagctacttttaatgcacgtaaacgtgaaaagacgttcttggtatcttagaagagattgcaatgaaaaaaat

SEQ ID NO: 17688 - RNA, 186 nt, unidentified
  source 1..186: mol_type = other RNA; note = Related to NZ_CP012737.1; note = Pseudoalteromonas sp.
tcccgtatcattgaagatgtttcttcttcgatagattaggggattctacatttagaataaagcctagtgctttctagctcctttatttacttgcttggcgccttgtatctcctgttgccgcttttaaagcacgtaaacgtgaaaagatgttctttgtgtcatggaagaaatagaaatgaaaaagat

SEQ ID NO: 17689 - RNA, 183 nt, unidentified
  source 1..183: mol_type = other RNA; note = Related to NZ_CP046329.1; note = Shewanella putrefaciens
tttggtatcataacaacgatttcttcatcgatagagtaaagggttttgcttgcagaacggagccttgagcttcctagcctatcatttacttgttgctgctacagttcgtatcgcacttttaagtacacgtaaacgtgaaaagatgttctttgtatcgtgaaaggaatcattaatgaaaaaata

SEQ ID NO: 17690 - RNA, 189 nt, unidentified
  source 1..189: mol_type = other RNA; note = Related to NZ_PKFV01000007.1; note = Lelliottia sp.
aatggtataataaatgagatttcttcgtcgatagattaaggggccttgcttgttaaggtgaagtcatgaacttcctagccctgtctctactagctcggcatcctggggttaccagtagcgcttttgaggcacgtaaacgtgaaaagacgttcattgtatcaacgcagagatcttttttatgctcaaatt

SEQ ID NO: 17691 - RNA, 183 nt, unidentified
  source 1..183: mol_type = other RNA; note = Related to MAJY01000007.1; note = Aliivibrio fischeri
tatgatattatctcccacgtttcgaattcgatagaataagggggcttgtttcgacaagcgagcgctggacgctcctagctctaatattagctagttaagattaatttggcttaatgagtgtacttttaaggcacgaacgtgaaaagatgttcaaagtatcgagattgaaacaatgaataaaaa

SEQ ID NO: 17692 - RNA, 189 nt, unidentified
  source 1..189: mol_type = other RNA; note = Related to JAKGAW010000004.1; note = Pseudoalteromonas sp.
tctgatattataaataaagtttccgcttcgatagagtagggacttatgctactacaggtaagtgattgcttgtcattcctagcccattaatggttaatcaaggctacttgtcgactaggcagccttttagcccacaaagtgaaaagatgttcttgtatcaaagcggaaacaataacttatggacaaaat

SEQ ID NO: 17693 - RNA, 190 nt, unidentified
  source 1..190: mol_type = other RNA; note = Related to BPFA01000013.1; note = Shewanella sp.
tatgatatagtacaaaaattctaaagcgatagatttatggggctttgatactaaagttaacgctagccgttattaacccagtggtcactaattacgataaattggtcgcaatgatgacctttcatcagcacgcaaagcgtgaaaggatgttctaggtatcgtatttggaattttaattcatgaaaataat

SEQ ID NO: 17694 - RNA, 216 nt, unidentified
  source 1..216: mol_type = other RNA; note = Related to NZ_AKXJ01000001.1; note = Pseudoalteromonas sp.
tccgatattattaaaaaggtttcttcctcgatagctcaggagggcttgtacgcaagtcgcaatgggtagagtcgaaatactttaaacagagctcagctcctaacagtcactagatgtgcgaggttatcatcatactttaatggtcgctttaagtgcacacagcgtgtaaagattgttcttttgtgtcaaggaagaaaccctaatcatgaaatataa

SEQ ID NO: 17695 - RNA, 218 nt, Vibrio sp.
  source 1..218: mol_type = other RNA; note = Related to BA000037.2; note = Vibrio vulnificus
ttcgatattattaggaaggtttcttcctcgacagctcaggagggcttgcactcaagtcgcaatgggtagagtcgaaatactttaaacaaagcttagctcctaacagtcagtagctgtgcgcagttagcatcatactttaatgttaactttaagggcacacggcgtgtaaagattgttcttttgtgtcggggaagaagccgagatattatgaaatataa

SEQ ID NO: 17696 - RNA, 218 nt, Vibrio sp.
  source 1..218: mol_type = other RNA; note = Related to JAKEUX010000001.1; note = Vibrio brasiliensis
ttcgatattatcaggaaggtttcttcctcgatagccaaggaggacttgtacgcaagtcgcaatgggtagagtcgaaaggctttaaacaaagcttagctcctaattgtcagtagcagtgtgcggtttccatcatgctttaatggtaactttaagtgcacacggcgtgtaaagattgatcttttgtgtcgaggaagaaacctagatcttatgaagtacaa

SEQ ID NO: 17697 - RNA, 218 nt, Vibrio parahaemolyticus
  source 1..218: mol_type = other RNA; note = Related to JABCDA010000001.1
tccgatatcatacggaaggtttcttcctcgatagctcaggagggcttgtccgcaggtcgcaatgggtaaagcccacaaggctttaaacaaagcttagctcctaacattcagtagctgtgtaaggttgccatcatactttaatgggaactttaaatgcacacggcgtgtaaagattggtcttttgtgtcgaggaagaaaccaaaactcatgaaatataa

SEQ ID NO: 17698 - RNA, 217 nt, Vibrio sp.
  source 1..217: mol_type = other RNA; note = Related to NZ_PIFZ01000001.1; note = Vibrio splendidus
tctgatattatcaggaaggtttcttcctcgatagcgcaggaggacttgcacgcaagtcgcaatgggtaaagttggaaaactttaaacaaagcttagctcctaacagtcagtagctgtgcgccgtttccattatgctttaatggtaactttaaggcacacggcgtgtaaagattggtattttgtgtcgaggaagaaaccgttatattatgaaatatag

SEQ ID NO: 17699 - RNA, 209 nt, Vibrio sp.
  source 1..209: mol_type = other RNA; note = Related to CP087877.1; note = Vibrio alginolyticus
tcggatatccttaagaaggtttcttcctcgatagctttgagggacttacatgtaagttgatacgggtagggtttttggctctaaactatcttaacctcaacattgactagctgagcttgtccaagtgtactttaatgtaaactttaaggctcacggcgtgtaaagattgaactttgtgtcgtggaagaaaccattacaatgaaaaacag

SEQ ID NO: 17700 - RNA, 201 nt, unidentified
  source 1..201: mol_type = other RNA; note = Related to CABDVD010000002.1; note = Raoultella terrigena
tatggtattatcaggaaggtttcttctgcgatagcttagagggatctcgaatcgaaacgtatgaagcttgcttcatactttccatagcctcttgatttactagctgatctggccaacggttgctctttaagcggcctttaatgctcacggcgtgtaaagattgaactttgtatcgtggaagaaaccaactatgattaagag

SEQ ID NO: 17701 - RNA, 193 nt, Vibrio sp.
  source 1..193: mol_type = other RNA; note = Related to JAHUCN010000002.1; note = Vibrio fluvialis
tcagatatccttaggaaggtttcttctgcgatagcctagagggatcttgtatcgaatcgtacttcgtacattcctagcctcgtgattcactagctgtactcgtcatagtttacgctttaaatgttctttaaggctcacggcgtgtaaagattgaactttgtatcgtagaagaagccaccttgatgataaaaag

SEQ ID NO: 17702 - RNA, 193 nt, unidentified
  source 1..193: mol_type = other RNA; note = Related to NZ_CP057313.1; note = Klebsiella pneumoniae
ataagtataatagagaaagcttcttcttcgatagaagctgaggaattcagtctatctggataaggtgttcgccacctctagcctcagtaaaaactagctcgtcctttgcgcagttggcgccatggatgactttaatactcacagagtgtaaagattggtcttggtatcggagaagaagctttatgaaaaataa

SEQ ID NO: 17703 - RNA, 193 nt, unidentified
  source 1..193: mol_type = other RNA; note = Related to DAFBNF010000007.1; note = Providencia rettgeri
attagtataatagataaagcttcttcttcgatagaagctggggaatccagtttatctggataaggtgttcgccacctctagtctcagtaaaaactagctcatcctatgcgcacttggcgccatggataactttaatactcacagagtgtaaagattggtcttggtatcggagaagaagccttatgaaaaaaca

SEQ ID NO: 17704 - RNA, 193 nt, Citrobacter sp.
  source 1..193: mol_type = other RNA; note = Related to CP018810.1; note = Citrobacter freundii
attagtataatcgaacaagcttcttcttcgatagaagctgaggagtccagtttgactggataaggtgttcgccatctctagcctcagtaaaaactagctcatcctttgcgcacttggcgccataggtaactttaatactcacagagtgtaaagattggtcttggtatcggagaagaagctttatgaagacgaa

SEQ ID NO: 17705 - RNA, 192 nt, unidentified
  source 1..192: mol_type = other RNA; note = Related to JACYMS010000012.1; note = Pantoea agglomerans
ataactataatacaaaaagcttcttcttcgatagaagctgaggtagtcagttaatctggctaaggcgttcgacgcctctggcctcagtaaacactagcctatcctattcgcgtttggcgtcatggatgctttaatactcacagagtgtaaagattggtcttggtatcggagaagaagctacatgaaaaacaa

SEQ ID NO: 17706 - RNA, 181 nt, unidentified
  source 1..181: mol_type = other RNA; note = Related to NZ_JACSXJ010000009.1; note = Pantoea eucalypti
atatctataatagagcaggcttcttcttcgatagattcaggggagtataactgagcgattgtcgttcctagcccctgcaaacactagtttgccgccgccaatttgtcgcgatggccgctttaagcctcacggggtgtaaagatggtcttggtatcggagaagaagcttttatgaaagaaaa

SEQ ID NO: 17707 - RNA, 179 nt, unidentified
  source 1..179: mol_type = other RNA; note = Related to PDLA01000006.1; note = Klebsiella pneumoniae
atatctataatagagcaagcttcttcttcgatagatataggggagtttcactgaacgattgtcgttcctagcccctgcaaacactagtttgccgccgccaattgtcgcgatgtccgctttaagcctcacggggtgtaaagatggtcttggtatcggagaagaagctttatgaaagaaaa

SEQ ID NO: 17708 - RNA, 185 nt, unidentified
  source 1..185: mol_type = other RNA; note = Related to CP064054.1; note = Morganella morganii
tcacatattatagatcatgcttcttcttcgatagaagctggagggctcaaatgagttgacgcatgtcgtcacgtgctccagcaaacactagcttagattgctctgcgtccgctaagccactttaagcctcacggggtgtaaagatgttatgggtatcgaagaggaagcttttttatgaaacataa

SEQ ID NO: 17709 - RNA, 185 nt, Escherichia coli
  source 1..185: mol_type = other RNA; note = Related to CP057173.1
tcgcatatcatcgatcatgcttcttcttcgatagaagctggagggctcaaatgagctgacgcatgccgtcacttgctccagcaaacactagctcggattgtcttgcgtccgctaagccgctttaagcctcacggggtgtaaagatgttattggtatcgaagaggaagcttttacatgaaacataa

SEQ ID NO: 17710 - RNA, 185 nt, unidentified
  source 1..185: mol_type = other RNA; note = Related to NZ_MJAO01000006.1; note = Serratia marcescens
tcacatattattgatcatgcttcttcttcgatagaagctggaggactcaaatgagttgacgcatgccgtcacttgctccagcaaacactagctcggattatcttgcgtccgccaagccgctttaagcctcacggggtgtaaagatgttattggtatcgaagaggaagcttttttatgaagcacaa

SEQ ID NO: 17711 - RNA, 185 nt, Proteus sp.
  source 1..185: mol_type = other RNA; note = Related to SCIO01000007.1; note = Proteus mirabilis
tcgcatatcttagatcacgcttcttcttcgatagaagctggggaactcaaatgagttgacgtttgtcgtcacttgctccagtaaacactagcttgggtaatctcgcattcgccaggccgctttaagcctcacggggtgtaaagatgttattggtatcgaagaggaagcttttttatgaaacataa

SEQ ID NO: 17712 - RNA, 184 nt, unidentified
  source 1..184: mol_type = other RNA; note = Related to NZ_QGOK01000008.1; note = Marinomonas shanghaiensis
tcgtatattttagagcaagcttcttcttcgatagaagtggggggtgttcgcacctgatcgtttaacgattctagccctaatttactatctatctgtcaactatgcctttaagttgctagcaactcacggtgtgtaaagattgttcatggtatcggagaagaagctttcctcatatgtttaaaaa

SEQ ID NO: 17713 - RNA, 186 nt, unidentified
  source 1..186: mol_type = other RNA; note = Related to NZ_LR136958.1; note = Alteromonas sp.
gatgatatcatcaaaagagtttctttttgatagagtatagagactgatgtttacatcagtgagtgccctgacgctccgagctcttaattaccaactctgagcctggtctcaccgacacgtaacttttagtccacgagcgtgaaaagatgtttttagtatcaaaagaaactattaaatgaaaaagtt

SEQ ID NO: 17714 - RNA, 202 nt, unidentified
  source 1..202: mol_type = other RNA; note = Related to JACHBV010000002.1; note = Rahnella inusitata
tctagtatgatagaaatgcttcgtctcgatagagagaaagggaccatgtaaatggtttaagatctgctttgtcggacttgactagccctaataagaaacagttcctcctacgatggtatgattttctcggatgaacttttagtttcactgctcgtgaaaagttgttcttggtatcgggacgaagcacatttacaaatattat

SEQ ID NO: 17715 - RNA, 203 nt, unidentified
  source 1..203: mol_type = other RNA; note = Related to NZ_RHDS01000003.1; note = Curtobacterium plantarum
tatagtatgatagataagcttcgtctcgatagagggtaaggggccatgcaaatggttcaagatctgattcgtcagacttgactagccctaataaagaccagttcctcctacgatgttatgattatcttggatgagcttttagtttcactgcccgtgaaaagttgttcttggtatcgggacgaagcacattttatacattatta

SEQ ID NO: 17716 - RNA, 203 nt, unidentified
  source 1..203: mol_type = other RNA; note = Related to NZ_CP059956.1; note = Pectobacterium brasiliense
tatagtatgcttgaaaagcttcgcctcgatagaattaaaggggtcacgtaagtgatacaagatctatctaggtagacttggctagccctaataactaccagtttagctatgattattatagttgtcttagataaacttttagtttcactacacgtgaaaagttgttcttggtatcggggcgaagcgtttttgattttttcatt

SEQ ID NO: 17717 - RNA, 223 nt, unidentified
  source 1..223: mol_type = other RNA; note = Related to UHIX01000001.1; note = Yersinia enterocolitica
aatgctataatattaaagctccagaactgatagatatcgagggtattttccaaagtaaaagcttaatctcaaatggataatatgtgtagcataagactcaccaagcctcatgtaattaccagtttcgatttgttattttgacgataatcgtaaagtatacttttaattacacaacgtgaaaagttgttatttgtatcagttctggagtttccatgttaaacaa

SEQ ID NO: 17718 - RNA, 221 nt, unidentified
  source 1..221: mol_type = other RNA; note = Related to FCGU01000001.1; note = Serratia marcescens
aatgatataatagccaagctccagatctgatagataatgagggtgtattcattactaggcttaacctcatgagtacatgtgtagcacaagactcaccttgcctcgcgtaattaccagtttcgatttgtcatcttgttgataatcgtaaattacacttttaattacacaacgtgaaaagttgttatttgtatcagatctggagttttcattatgttaaaaaa

SEQ ID NO: 17719 - RNA, 211 nt, Proteus sp.
  source 1..211: mol_type = other RNA; note = Related to NZ_CP043925.1; note = Proteus columbae
tctgatataataaaaaatctccggttttgatagtttgaagggcacagtcacaggagcttaacctgattgtgtgctagcttaggtctggcctagcctgcattaaccagttagcttatgatttccctattggaatgttaaaggttacctttttaattgcacagagtgaaaatctgttattggtatcaagatcggagttttttatgattaagtt

SEQ ID NO: 17720 - RNA, 212 nt, unidentified
  source 1..212: mol_type = other RNA; note = Related to NZ_CP063241.1; note = Pectobacterium brasiliense
agtagtattttagacagacttcggttccgatagataaaggggtcataaatatttttgaatttatgacgaacgcttgacgttcctatggtcagattttggtctgatcagcctattattgactagctggtctcattagtcttacgtagactttgtaagccactaaagtgaaagtctgttcattgtatcggaaccgaagtaatcatgaataagat

SEQ ID NO: 17721 - RNA, 212 nt, unidentified; identical to SEQ ID NO: 17720
  source 1..212: mol_type = other RNA; note = Related to JACHAN010000001.1; note = Pectobacterium brasiliense

SEQ ID NO: 17722 - RNA, 210 nt, Citrobacter sp.
  source 1..210: mol_type = other RNA; note = Related to CP056181.1; note = Citrobacter freundii
agtgctattatagaaaaacttcggttccgatagataaaggggtcatgagttttttaatttatgacgaacgcttgacgttcccatggttagattttgttctgaccagcctattatttactagcgggtctcactagtctcaggtagactttctggggcactaaagtgaaagtctgttcattgtatcggaaccgaagtaaccatgaataagat

SEQ ID NO: 17723 - RNA, 207 nt, unidentified
  source 1..207: mol_type = other RNA; note = Related to NZ_WHOZ01000001.1; note = Pantoea agglomerans
agtgctatttttaaaaagcttcggttccgatagataaaaggatcataagtttttgatttatgatgagcgcttgacgttcctatgttcagatttttctgtacagcctattattgactagctggtctcaatggtctcaggtagcctttctggggcactaaagtgaaagcctgttcattgtatcggaatcggagtaaccatgaaaaaaat

SEQ ID NO: 17724 - RNA, 196 nt, Proteus sp.
  source 1..196: mol_type = other RNA; note = Related to JADSTY010000052.1; note = Proteus mirabilis
aatgagataatagacaagcttcggttccgatagatattgggggcataattatgttggttgcttgacagccctatagtcaaattttttggctagcccaacattaactagctggtctcactggtcatagtttaacttttaggccactaaagtgaaagtctgttcattgtatcggaatcgaagtaattatgaaaaaaat

SEQ ID NO: 17725 - RNA, 193 nt, unidentified
  source 1..193: mol_type = other RNA; note = Related to NVWN01000005.1; note = Arcobacter sp.
atgtcaattaaagaaaaactttagtttgatagacttggaattttattacttacgagtaaagaaatatatgcttgacatatctagtccttcaactactaatttgcttagatttttacaacgccttacagttgttggatccactgttgtgaaaaattgttctttgtatcaaactaggtttttttatgtataaaat

SEQ ID NO: 17726 - RNA, 196 nt, unidentified
  source 1..196: mol_type = other RNA; note = Related to JAIZPA010000057.1; note = Sulfurovum sp.
acaagtattgaaaccaagctaccgtctgataggtaagggactttgttactctcgagtaataaagtatatgctggacatatctagcccaaaaagtactagttcgcgctacttagctttagccttgactgatgctcacagtaaacttgtgagtcgttgttcttttgtatcagacacaaggtttcaatatgggtaaaat

SEQ ID NO: 17727 - RNA, 197 nt, unidentified
  source 1..197: mol_type = other RNA; note = Related to MICC01000016.1; note = Sulfurimonas sp.
atgcttatcgaaaaaaaactttagtctgataggtaagggattttatcacatttatgttttaaagtgtatgcttgacatacctagcctaaaaactactaagctgtcgctgttcagtatacgatatactggtagcgttgactcacgtgccgtgagatgttgttcattgtatcaggctaaagttcttcgatgaaaaaaat

SEQ ID NO: 17728 - RNA, 193 nt, unidentified
  source 1..193: mol_type = other RNA; note = Related to NZ_PDKB01000007.1; note = Aliarcobacter vitoriensis
tttgatataataacacttgtcgaaaagtctctatctgatagataagggatttaaaatgaattttttaaatatatgcttgacgtatctagcccaaaaagtactattgatttacagcattttagataaatctttagtccactttgtgaaatattgtaatttgtatcaggtatggtagcttttcgatgaaaataaa

SEQ ID NO: 17729 - RNA, 191 nt, unidentified
  source 1..191: mol_type = other RNA; note = Related to NZ_VWUH01000001.1; note = Pantoea sp.
tatagtatattaaacaggcttcgcacctgatagggataggggccatttggtggcgcaagctggacttgcctagccctatagctaccagcttcctcctaggcgtcacaggggttactggtcgcacttttagtgttcacgacacgtgaaaagatgttctttgtatcagggcgaagcttttttattaaaatgcc

SEQ ID NO: 17730 - RNA, 194 nt, unidentified
  source 1..194: mol_type = other RNA; note = Related to JAENMR010000003.1; note = Lelliottia amnigena
tttagtataatacataggcttcgcacctgatagacagaggggccattctttggcacaagcttgacttgtctagccctacagttaccagctcgcctcctaagcatcactaggtttactggtcgcacttttagttttcacggcacgtgaaaaggtgttctttgtgtcagggcgaagctttttttaacaaagtagaa

SEQ ID NO: 17731 - RNA, 194 nt, unidentified
  source 1..194: mol_type = other RNA; note = Related to NZ_CP011303.1; note = Serratia liquefaciens
tatagtataataaacaagcttcgcacctgatagatatagggaccatgacctggtacaagctcgacttgtctagccctttcaactaccagctcgcctctcagctatgcggtgatgcggtaagcgtacttttagttatcacgacacgtgaaaagatgttctttgtatcagggcgaagccaccctctttaacttaaa

SEQ ID NO: 17732 - RNA, 231 nt, unidentified
  source 1..231: mol_type = other RNA; note = Related to NZ_JACYTP010000002.1; note = Photobacterium arenosum
tatgatatcattcgtatgcttcaacccgatagtagaggggagatatgagtttcgacaagtatctgagagcttgcctctcccgctctttgcttgagggagtccaacttctttttgctttgggcatagtcctaatgactgctaatctggtcgctctgattagtatgtgtcgaagtacacacctacggtgtaatggtgttcttttgtatcgggttgaagctctatgattaaaaa

SEQ ID NO: 17733 - RNA, 229 nt, Vibrio sp.
  source 1..229: mol_type = other RNA; note = Related to BBMT01000003.1; note = Vibrio maritimus
tatgatatcattcgtatgcttcaaccgatagtagagggagatatgagtttcgacaattatctgagagcttgcctctcccgctctttgttagagagagttcaacttctctcttctttgggcatagtcctaatgactactaatctggtcactgtgattagtatgtgtcgaagtgcacacctacggtgtaatggtgttcttttgtatcgggttgaagctctatgatcaagaa

SEQ ID NO: 17734 - RNA, 234 nt, unidentified
  source 1..234: mol_type = other RNA; note = Related to JAJRLY010000005.1; note = Klebsiella pneumoniae
tatgatatcattcgtatgcttcaacccgatagtagaggggagatatgagtttcgacaaatatctgagagcttgcctctcccgctctttgcttgaggaagtccaacttctttttgctttgggcatagtcccaatgactgctaaactagtcactctgattagtatgcgtcggagtacacacctacggtgtaatggtgttcttttgtatcgggttgaagctctatgatgaaaaataa

SEQ ID NO: 17735 - RNA, 230 nt, Vibrio sp.
  source 1..230: mol_type = other RNA; note = Related to LWEH01000044.1
tatgatattattcgtatgcttcaacccgatagtagaggggagatatgagtttcgacatatatctgagagcttgcctctcccgctccttgcttgaaaaagtccaacttcctctagcttcgagcatagtcctaatgattgctaatttagtcactgtgattattgtgcgctaaatacacacctacggtgtaattgtgttcttttgtatcgggttgaagctctatgattaaaaa

SEQ ID NO: 17736 - RNA, 231 nt, unidentified
  source 1..231: mol_type = other RNA; note = Related to NZ_PNDJ01000020.1; note = Pseudoalteromonas sp.
tatgatattattcgaaggcttcaacctgatagtagaggggagatatgagttattacgagtatctgagagcttgcttctccagttctcagccacagaaaacctgttcttctgtggctttgagcgcagccccaataggcactaatctgatgtcgccgattagcatgcttctaagtcacacctacggtgtaatggtgttcttttgtatcaggttgaagcatctatgattaatac

SEQ ID NO: 17737 - RNA, 234 nt, Vibrio sp.
  source 1..234: mol_type = other RNA; note = Related to UHIJ01000001.1; note = Vibrio alginolyticus
tatgatattattcgtatgcttcaacccgatagtagaggggagatatgagttttcacgagtatctgagggcttgcccctccctctctttgtttctgggagttcgtcttccagtaactttgagtacagtcccaatagttactaatctggtcgcgctgattaatgtgtctgatagtacacacctacggtgtaatagtgttcttttgtatcgggttgaagcaatataatgaataaaaa

SEQ ID NO: 17738 - RNA, 200 nt, unidentified
  source 1..200: mol_type = other RNA; note = Related to NZ_MNAN01000032.1; note = Pseudoalteromonas byunsanensis
gatgatataattaagcggcttcaacccgatagtagaggggagataaaattgtaaagtctttatctgagggcctgttcctccagtcttcggacatagtcccattgattaccactcagttggctatattagcgtgtagaggggtcacacctgcggtgtaatgatgttcttttgtatcgggttgaagcacctatgaataataa

SEQ ID NO: 17739 - RNA, 230 nt, Vibrio sp.
  source 1..230: mol_type = other RNA; note = Related to CP017889.1; note = Vibrio alginolyticus
tatgatattattcgtatgcttcaacccgatagtaggggggagatatgagttattacgagtgtctgagagcttgcctctcccgctcattgattcaaggggttcgccctctttttgatttgagcacagtccctgtagttactaacttggtcgctacgattaatgtgatgtcgattcacacctacggtgtaatgatgttcttttgtatcgggttgaagcacaatgattaataa

SEQ ID NO: 17740 - RNA, 231 nt, Salmonella sp.
  source 1..231: mol_type = other RNA; note = Related to CP079839.1; note = Salmonella enterica
tatgatatcatcagaaggcttcaacccgatagtagaggggagatatgagtttttacgagtatctgagggcttgcccctccagtttgatgccattaagtgaaagttgctttttggctttaagcatagtcccaatagtgactaacctagtcactcgtattagtgtaaccgatgagtcacacctacggtgtaatgttgttcatttgtatcgggttgaagcaatatgaaaaataa

SEQ ID NO: 17741 - RNA, 192 nt, Vibrio sp.
  source 1..192: mol_type = other RNA; note = Related to NZ_JACVEG010000002.1
tatgatattataagaatgcttcaacccgatagtagaggggagatatgagtctagtacgaatatctgagagctggtctctcctagtcccaataattgccatttcaattggccatattattagtgtgcttaaaggtcacacctacggtgtaatgatgttcttttgtatcgggttgaagcacttatgaagaaaat

SEQ ID NO: 17742 - RNA, 208 nt, unidentified
  source 1..208: mol_type = other RNA; note = Related to NZ_WTLC01000042.1; note = Pseudoalteromonas sp.
tatgatattattcgaaagcttcaatccgatagtagaggagaggtatgagtctagtgcacatatcagagggcttgttcctccagcttttgaaagaaagcacagctccaatagtcactatcctatgcatgttgaattagtgtctgaatagttcacacctacggtgtaataatgttcttttgtatcggattgaagcaaacatgaaaaaaat

SEQ ID NO: 17743 - RNA, 194 nt, Aeromonas sp.
  source 1..194: mol_type = other RNA; note = Related to NZ_RJCW01000006.1; note = Aeromonas dhakensis
aatgatataatcgatatgcttcaacccgatagttgaggagtgatgtacgagccaagctctgcattagagggctagaccctcctagttcctatagttactagccatctagttggcgatcattagtggtctagtggcacaccttcggtgtaattttgttcttttgtatcgggttgaagcataaatatgaacgaaat

SEQ ID NO: 17744 - RNA, 199 nt, unidentified
  source 1..199: mol_type = other RNA; note = Related to CP069319.1; note = Kosakonia cowanii
tatgatataatccagaggcttcaacccgatagttaatgggagatataagcttcggtttatatctgagggctggaccctcccgtcgtttgacatagcccacgagtgactagttggcatcacgtgtgattagtctctggaaggcacacctgcggtgtaacgttgttctttgtatcgggttgaagcaactaatgaaattaat

SEQ ID NO: 17745 - RNA, 198 nt, unidentified
  source 1..198: mol_type = other RNA; note = Related to FMAY01000002.1; note = Kosakonia oryzendophytica
catgatattatccaaaggcttcaacccgatagttaacgggagatataagcttaggtgagtatctgagggctagtccctcctgtcttttgacatagcccacgagtgactagttagcatcaggtgtgattagtcgctggaaagcacacctacggtgtaacattgttctttgtatcgggttgaagcactaatgaaattaat

SEQ ID NO: 17746 - RNA, 231 nt, Vibrio sp.
  source 1..231: mol_type = other RNA; note = Related to NZ_CP090019.1; note = Vibrio kanaloae
catgatatattgacaaggcttcaacccgatagttaaagggagacgagtggttcactccacccattgagggtaaagcccttccacgaggttagaataatcttcatccaggttgttttttcctccgagtcccagaattatcaaatgattacaatttataaatgttatcattcggtcaccttcggtgtaactttgttcttttgtatcgggttgaagcaacattatgaaaaaaat

SEQ ID NO: 17747 - RNA, 231 nt, unidentified
  source 1..231: mol_type = other RNA; note = Related to WMDK01000003.1; note = Photobacterium carnosum
tatgctatattgaacaggctttatcctgatagacttcagagatcattatctcaatagggttaatgacaagagggaactcttcaggagtttgacttcaactatttatagatgattttgagctccaacgtctctagatcacagcttgattacagttatgtcaatgtgttcaatgtgtcacacagtgaatttttgtttttgtatcaaagataaagcgtattatatgtcaaaata

SEQ ID NO: 17748 - RNA, 231 nt, Vibrio sp.
  source 1..231: mol_type = other RNA; note = Related to MCSX01000068.1; note = Vibrio cyclitrophicus
tatgctatattgaacaggctttatcctgatagacttaagagatcactatctcatgttagttagtgaaaagaggtaactcttcagaagtcaaatatccatcttagttggtggtgattgatctcaacgtctctaaacggtagcttgattaccgttatgttaaatgtgttcaaagtgtcacgcagtgaatttttgtttttgtatcaaagataaagcgtattgtatgtcaaaata

SEQ ID NO: 17749 - RNA, 198 nt, Aeromonas hydrophila
  source 1..198: mol_type = other RNA; note = Related to JAEHJS010000001.1
catggtatggttaacttgctctcttttgatagcacaagggaatgaatttcgattcattgcacgggtaacctgccagcacattttaagtaatgtgcatcgtccctatacaccagccatgtcgacgtgtcgacgctggccactgggtgtcacgcagtgatggcgtggattgtatcaaaagagggcctttatgaataaaac

SEQ ID NO: 17750 - RNA, 232 nt, Citrobacter sp.
  source 1..232: mol_type = other RNA; note = Related to CP057863.1; note = Citrobacter freundii
gatggtatcatcagaaatgtttacattcggtagtaatagagattgccttgtgcaatgtaggggaacctaccatctatctttgcgacagtgtagattttatatcattagtaaaattttatgcttaagcttggttagaacagtctccacataccagtgtgattactttgatattcgcgcattatgtgtcacacgtgaatgtttgtttttgtatcggattaaacatgaaaataac

SEQ ID NO: 17751 - RNA, 179 nt, unidentified
  source 1..179: mol_type = other RNA; note = Related to PNCI01000020.1; note = Pseudoalteromonas rubra
tatgttacaatttctcagctacgttacggtagctaaaaggggaaagcttgctttaaaaggtcactacctttcaagcccttatttactagctccatgacgcctagtagttcgcttctaaagcttcactaaagtggaactttgtaatttgtaccgtgacgtagctagcttatgaaattatc

SEQ ID NO: 17752 - RNA, 178 nt, unidentified
  source 1..178: mol_type = other RNA; note = Related to NZ_AHBZ03000021.1; note = Pseudoalteromonas citrea
tatgatactatttctcaactacgttacggtagttagaaggggaaagttcgctttaaaaggttgttacctttcaagcccttatttactagctccatgcgcctagtagttcgattctaaaatcccactaaagtggaactttgtaatttgtaccgtaacgtagcctacttatgaaattatc

SEQ ID NO: 17753 - RNA, 179 nt, unidentified
  source 1..179: mol_type = other RNA; note = Related to NZ_CP045418.1; note = Pseudoalteromonas sp.
tatgatactctttctcagctacgttacggtagttcagaaggggaaagcttgctttaaaaggttgtcacctttcaagcccttatttactagctccatatgtctagtagttcgattctaaaatcccactaaagtggaactttgtaatttgtaccgtaacgtagccaacttatgaaattatc

SEQ ID NO: 17754 - RNA, 178 nt, unidentified
  source 1..178: mol_type = other RNA; note = Related to NZ_CP055159.1; note = Shewanella algae
tatggtataatctccgagctacgttacggtagctaacggggaaagttcgcttttgaaggttgttaccttccaagcccttgtttactagttatattacaatgtgtcgacagttttgatgacactaaagtgaaactttgtaatttgtaccgtaacgtagcgattataaaatgaaaaaaat

SEQ ID NO: 17755 - RNA, 177 nt, unidentified
  source 1..177: mol_type = other RNA; note = Related to JADYXO010000004.1; note = Pseudoalteromonas sp.
tatggtattattactcagctacgttacggtagctgacggggaaagcttgctttcaaaggttgttacctttccagcccctgttcattagatgtatcactcgctattcgtagtttgctgatcactgaagtgaaactttgtaatttgtaccgtaatgtagcaaataattatgtcaaaaat

SEQ ID NO: 17756 - RNA, 223 nt, unidentified
  source 1..223: mol_type = other RNA; note = Related to JADYXL010000003.1; note = Pseudoalteromonas sp.
catgatataataacaaggcttcaatctgataggtaatgggaacggtttagttattaatttaacttaattgtaagggcttgtcccttcatgaacttaatataactagttcataaataaataaatagtctctcagtcagcagttcattgtcagcgtgtctgagtactcaaggtcacatgtgcaactctgaaaatgtatcagattggagcaattgatgaaaacaat

SEQ ID NO: 17757 - RNA, 144 nt, unidentified
  source 1..144: mol_type = other RNA; note = Related to JAFDVW010000003.1; note = Acidobacteria bacterium
tccaagccggtccataggcagcttcggctccattggatctctctggggttaccccaggggaacgtgcatagcttaggtttcatcgcgtgaacggccctgcgcggccgcgcagacatggtcacgcacagtgagactcgttggttg

SEQ ID NO: 17758 - RNA, 149 nt, unidentified
  source 1..149: mol_type = other RNA; note = Related to JAFAPG010000514.1; note = Acidobacteria bacterium
tccaagcatagcttgtcttgagccctagtggcttggtcaggcttctccggggttaccccggggcaacgtgaaaaactgacaattcgtcgcgtgagctttgctgcgcgccagcgcaggcggggctcatgcagagtgagactggttggagc

SEQ ID NO: 17759 - RNA, 145 nt, unidentified
  source 1..145: mol_type = other RNA; note = Related to QHZV01000271.1; note = Acidobacteria bacterium
tccaagctggtttgatcgagctttcgggctcggttgggcctctctgggggttaccccaggggaacgtgaagaactgacattccggcgctagagcttaactgcgcgttgcgcaggcctgctcatgcaaggtgggactcgttggagt

SEQ ID NO: 17760 - RNA, 147 nt, unidentified
  source 1..147: mol_type = other RNA; note = Related to JAIQGJ010000043.1; note = Acidobacteriia bacterium
tccaagccggtctgatcgagctcttttgggttcggtttggcctctctggggttaccccagggaattgcgagacctcgggatttcatcgcgtgagcggccctgcgcgactgcgcagatttgctcacgcaaggcaagactcgttggagc

SEQ ID NO: 17761 - RNA, 147 nt, unidentified
  source 1..147: mol_type = other RNA; note = Related to QHYC01000242.1; note = Acidobacteria bacterium
tccaagcttggcttttatcgagctctcgggctcggtttggcctccctggggttaccccagggaaacgtgaagaactgagatttcgtcgcgtgagcttcgctgcgcgactgcgcaggcctgctcatgcaaggtgagactcgttggagc

SEQ ID NO: 17762 - RNA, 136 nt, unidentified
  source 1..136: mol_type = other RNA; note = Related to QIAA01000032.1; note = Acidobacteria bacterium
tccaagcggaccttcgggtttgctttgagcctctctggggttaccccaggggaacgtgaacgactaggctttcatcgcgtgagcggcgctgcgcgactatgcagttatgctcacgccgggtcagacaggttggggc

SEQ ID NO: 17763 - RNA, 147 nt, unidentified
  source 1..147: mol_type = other RNA; note = Related to JAFDVQ010000015.1; note = Acidobacteria bacterium
gccaagccgggcttgcatcgggactcgcgttccggtgcggtcctctccggggctaccccagggaaaagtgaataactggagattcatcgggtgatctcaaccacgcgctgcgtggggctgatcacgcaaggccagactcgttggcgt

SEQ ID NO: 17764 - RNA, 145 nt, unidentified
  source 1..145: mol_type = other RNA; note = Related to JAFAQG010000033.1; note = Acidobacteriaceae bacterium
tccaagccggtgcgaatcgggccttgccgttcggttccatctctccggggttaccccggggtaacgtgaagaactcacatttcgtcgcgtgaggttcgctgcgctccgcgcagaacttctcacgcagtgccagactcgttggggc

SEQ ID NO: 17765 - RNA, 147 nt, unidentified
  source 1..147: mol_type = other RNA; note = Related to QIAH01000498.1; note = Acidobacteria bacterium
tccaagctggtgtggaacgggctctcgtggcccgcctgcatctctctggggctaccccagggaaacgtgtagagctgacaattcgtcgcaagaccttctctgcgagtccacgcaggactggtcatgcaaggtgagactcgttggagc

SEQ ID NO: 17766 - RNA, 148 nt, unidentified
  source 1..148: mol_type = other RNA; note = Related to JAFKEE010000018.1; note = Acidobacteria bacterium
tccaagctcggtctggatcggtctccaatggtcggttcagcctctctggggttaccccagggcatcgggaatagccaggcattcgtcgcgtgcgcttcggctgcgctgtcgcgcagttctgcccacgccaggtgagactcgttggagc

SEQ ID NO: 17767 - RNA, 148 nt, unidentified
  source 1..148: mol_type = other RNA; note = Related to NZ_CP063849.1; note = Paludibaculum fermentans
tccaagctcggtctgaatcggtcattcgtgttcgattcagcctctctggggttaccccagggcatcgggaatagccaggcattcgtcgcgtgtgcttcggctgcgctgtcgcgcagttctgcccacgccaggtgagactcgttggagc

SEQ ID NO: 17768 - RNA, 148 nt, unidentified
  source 1..148: mol_type = other RNA; note = Related to JACJWB010000023.1; note = Bryobacterales bacterium
ctcgagctcggcgttggttgagcgtttacgtttgacccctcgcctctccggggataccccgggggatgttggtgtgtctccattgcagcgcgcgagcttcgccgcgtccgaagcggaaccgctcgcgcagggtgggattggtcgggtt

SEQ ID NO: 17769 - RNA, 147 nt, unidentified
  source 1..147: mol_type = other RNA; note = Related to JACMLA010000763.1; note = Bryobacteraceae bacterium
tccaggccgggccgtcgctggaatcttcggattcggttaggtctctctggggctaccccagggcatcactctaagcaggcaattcgtcgcgcgagcaaccctgcgctgtacgcagaaacgctcgcccaaagtcagactcgctgggta

SEQ ID NO: 17770 - RNA, 144 nt, unidentified
  source 1..144: mol_type = other RNA; note = Related to JAFAUE010000361.1; note = Acidobacteria bacterium
ttcaagttggctcgggttgggcttaggcccaatttgggtctccctggggataccccagggaatggagaatgactgggatttcgtcgcatgagcgaccctgcctaaaaggcagacctgctcacgcagagtcagactggttgagcg

SEQ ID NO: 17771 - RNA, 150 nt, unidentified
  source 1..150: mol_type = other RNA; note = Related to JAEUQG010000434.1; note = Bryobacterales bacterium
tccaagcgctggtgcaatcgagcccctgaggtccggttcgccttctccgaggctacctcgcgaggattgtgttacgccgccattgcgtcgcgtgcgcgcgtctgcactgagcgtgcagtacagcgcacgccgggttggacaggttggatc

SEQ ID NO: 17772 - RNA, 151 nt, unidentified
  source 1..151: mol_type = other RNA; note = Related to JAFDVS010000120.1; note = Acidobacteria bacterium
tccaagcaaggtgtcatgcgtgctttcgtggcccgtatgcgccactccgaggttacctcgggggtattttctgatgtcgccgattcgtcgcgtgagcgtgcactgcgcctgacacgcagatgtgctcacgccatgtaggacaggttggacc

SEQ ID NO: 17773 - RNA, 146 nt, unidentified
  source 1..146: mol_type = other RNA; note = Related to JAFDVZ010000005.1; note = Acidobacteria bacterium
ttcaagctaggcggcatcgggctttcgggttcggttacgcctctccggggataccccgggggagaggtttgagttcgcatttcgtcgcgtgaggcccgccgcgctccgcgcggatcagctcacgcatccgtcagacacgttggagc

SEQ ID NO: 17774 - RNA, 146 nt, unidentified
  source 1..146: mol_type = other RNA; note = Related to JAIEMJ010000003.1; note = Bryobacteraceae bacterium
tcccagcttggcgccagaccgttcggtgcctctctggggttaccccagggaatttctgtagtagtccgtttcgtcgcgtgagcgggcgcctgcggcgcactacgcttcgcgtagatctgctcactcctggtgagatacgtgggagc

SEQ ID NO: 17775 - RNA, 144 nt, unidentified
  source 1..144: mol_type = other RNA; note = Related to AP025252.1; note = Bryobacterales bacterium F-183
tgcaagctggtgtgtgtttatccaaacatgcgcctctccggggttaccccggggcatgctgttgatttgccacatttcgtcgcgcgaagatgcaggcgtgcgcaagcgcacgaacccttcgcctaaggtgagacacgttgcatg

SEQ ID NO: 17776 - RNA, 147 nt, unidentified
  source 1..147: mol_type = other RNA; note = Related to JAEUQE010000020.1; note = Bryobacterales bacterium
tccaagtttggcgcttgccggatgacatgtctggctcagcccctctggggttaccccagggcgtattcgtaagctgatcgttcatcgcgtgagccgtcactgcgccagggcgcagatgcgcgcacgcagcgtgagactggttggatt

SEQ ID NO: 17777 - RNA, 153 nt, unidentified
  source 1..153: mol_type = other RNA; note = Related to JAEUQF010000393.1; note = Bryobacterales bacterium
tccaagcccggcaatggccgcatccgtcatcggttccgccaaagcctctttggggttaccccagggaatgtccgttacctccgcacttcgtcgcgtggacggcacctgcgccacggcgcagacaggtccacgcacagtgagtcccgttggagg

SEQ ID NO: 17778 - RNA, 152 nt, unidentified
  source 1..152: mol_type = other RNA; note = Related to JADLFK010000145.1; note = Gemmatimonadaceae bacterium
ttcaagccggttgctccgtactgctgatcacagcacggacgcgccactccggggataccccgggggtgtacaggaaagagagaattcatcgcatgcgctccgctgcagccttcacggcagtatcgcgcacgcacagtcagactcgttggagc

SEQ ID NO: 17779 - RNA, 160 nt, unidentified
  source 1..160: mol_type = other RNA; note = Related to JACMJE010000135.1; note = Phycisphaerae bacterium
tccaagccggtactccgcgggttgtgccagccgtgccgcgcgtaccaatccggggctaccccgggtgttcgtatgaagcttctatttcgtcgcaggagcggccactgcgatcgctgcgctcgcgcagttcccgctcgcgcaaggtcagattcgttggaac

SEQ ID NO: 17780 - RNA, 146 nt, unidentified
  source 1..146: mol_type = other RNA; note = Related to JAEUQC010000130.1; note = Bryobacterales bacterium
cctaagccggttgaatcacggcagttcctgcccggttgaaccactctggggtatccccagggatcttttccgatggagcatttcgtcgcgtgaccgccgctgcgccttgcgcagatatggtcacgccaggtgagactcgttgggac

SEQ ID NO: 17781 - RNA, 124 nt, unidentified
  source 1..124: mol_type = other RNA; note = Related to NZ_SDMK01000004.1; note = Acidipila dinghuensis
tccaagccggccgcaaggtctctccggggctaccccggggcaacgtgtggaatacagcaggcaccgcatgagcctccctgcacgctgtgcagatccgctcacgcaaagtcagactcgttggagc

SEQ ID NO: 17782 - RNA, 148 nt, unidentified
  source 1..148: mol_type = other RNA; note = Related to VANK01000001.1; note = Acidobacteria bacterium AB60
tccaagctggcaagggaagaagccctcgggcctcgcccttacctctctggggttaccccagggcaacgtggcaatccgggcactcgtcgcgggagcctcgctgcgctcgcacgcagatcagctcccgccaggtcagactcgttggagc

SEQ ID NO: 17783 - RNA, 144 nt, unidentified
  source 1..144: mol_type = other RNA; note = Related to NZ_SIHJ01000001.1; note = Posidoniimonas corsicana
accaagcttgccgaatccgcggttcgcccgcgtctcggctctctggggttaccccagggcagattgaagggttcgcgtttcagcgcgtgaggtgccatgcgcgcctacgcatcgtacctcacgcccgaccagactcgttggtgg

SEQ ID NO: 17784 - RNA, 143 nt, unidentified
  source 1..143: mol_type = other RNA; note = Related to NZ_SJPO01000016.1; note = Posidoniimonas polymericola
ctcaagcttgctgatcgttggttcgtccgcggctcggctctctggggctaccccaggggaggttgaagggttcgacgttcgtcgcgtgaggcgccatgccctccggtgcatgattcctcacgccagaccagactcgttgggcg

SEQ ID NO: 17785 - RNA, 145 nt, unidentified
  source 1..145: mol_type = other RNA; note = Related to CP036291.1; note = Pirellulimonas nuda
tccaagctcgttgagattggaggtccgtcttcgtctcgactctctggggttaccccagggcaatatgaagggttcgtgattcgtcgcgtgaggtgcgatgcgctgctacgcatcattcctcacgccagaccagactcgttggggc

SEQ ID NO: 17786 - RNA, 143 nt, unidentified
  source 1..143: mol_type = other RNA; note = Related to PNKX01000009.1; note = Pirellula sp.
ttcaagccggttagcttgggccgttaaggtcgactaacctctctggggataccccaggggatcgtgaaagggttggatttcgccgcgtgagcgaagatgcgcggtgcgcatgaatgctcacgctagaccagtctcgttgagat

SEQ ID NO: 17787 - RNA, 145 nt, unidentified
  source 1..145: mol_type = other RNA; note = Related to RECD01000177.1; note = Planctomycetaceae bacterium
tccaagccggtgaggtcgagcgtgctgcgttcgattcgcctctctgaggttacctcaggggatcatgaagggctaggatttcgaggcgtgagcgtcgatgcgctaccgcgcataatagctcacgccggacaagactcgttggagt

SEQ ID NO: 17788 - RNA, 145 nt, unidentified
  source 1..145: mol_type = other RNA; note = Related to JAGQPE010001238.1; note = Planctomycetales bacterium
tccaagctggttgcgtcccgtgaactcgcggcgatgcgactctctggggttaccccagggcatgatgaagggtttcgatttcgaggcgtgagccgcgatgcgttgtcacgcatagttgctcacgcaggaccagactcgttggggc

SEQ ID NO: 17789 - RNA, 144 nt, unidentified
  source 1..144: mol_type = other RNA; note = Related to NYXM01000103.1; note = Planctomycetaceae bacterium
gtcaagccggcaaggatcggacctttgagttcgacctgtctctctggggataccccaggggatcgtgaatggttaggatttcgtcgcgtgagtcggaatgcgctccacgcatgatgactcacgctggaccagactcgttgaggt

SEQ ID NO: 17790 - RNA, 143 nt, unidentified
  source 1..143: mol_type = other RNA; note = Related to JAAYAY010000047.1; note = Planctomycetaceae bacterium
tccaagccggcaaagatcgaacctcgcgttcgtcttgcctctctggggctaccccaggggatcgtgaaacgttaggattgcgtcgcgtgagcgttgatgcgtttcacgcatagccgctcacgccggaccagactcgttgggat

SEQ ID NO: 17791 - RNA, 143 nt, unidentified
  source 1..143: mol_type = other RNA; note = Related to SJPS01000003.1; note = Bythopirellula polymerisocia
cccaagctggttacgctcgaacttaaagttcgactaacctctctggggctaccccagggaatcgtgaatggttgaatttccggcgcgtgagctgcgacgcgttccacgcatgatagctcacgctggaccagactcgttggggt

SEQ ID NO: 17792 - RNA, 147 nt, unidentified
  source 1..147: mol_type = other RNA; note = Related to JAGQOY010000114.1; note = Planctomycetales bacterium
tccaagccggcaaaagtcgactggaaagtctactctttgtctctctggggataccccagaggatcttgaaggaattggcatttcgtcgcgtgagtaaccatgcgttgacacgcatcaacactcacgcccgaccagattcgttgggat

SEQ ID NO: 17793 - RNA, 147 nt, unidentified
  source 1..147: mol_type = other RNA; note = Related to JAGQOX010000111.1; note = Planctomycetales bacterium
ctcaagccggcaaagtgtcaccgcgaggttgacatcgttgcctctctggggttaccccaggggatcatgaaaggttcggatttcgacgcgtgagtcaggatgcgatcccacgcataacaactcacgccagaccagactcgttgaggt

SEQ ID NO: 17794 - RNA, 148 nt, unidentified
  source 1..148: mol_type = other RNA; note = Related to JAGQPK010000195.1; note = Planctomycetales bacterium
cccaagctggcggaagactggcttgaaagtcaatgcttcagcctctctggggataccccaggggatcgtgaatgactagcaattcgtcgcgtgagttcccctgcgctgacacgcagaatgactcacgccagaccggactcgttgggag

SEQ ID NO: 17795 - RNA, 147 nt, unidentified
  source 1..147: mol_type = other RNA; note = Related to JAGQQK010000642.1; note = Planctomycetaceae bacterium
actaagcgggtgctgttcctgctctgcaggtgcaaacacctcttcggggttaccccgaggaatcgtgaatggtcagtcattgacgtcgcgtgagcggagatgcgcagacacgcatgattgctcacgccgaaccagtttcgttagttt

SEQ ID NO: 17796 - RNA, 146 nt, unidentified
  source 1..146: mol_type = other RNA; note = Related to DNWZ01000023.1; note = Planctomycetaceae bacterium
cccaagctgatctgtgtcattcccatcggttctggcacgatctccctggggataccccagggcaatgaattgttcgcttttcatcgcacgagcggccttgcgcgcgacgcgcaaaatagctcgcgctaaacgtgactcgttgagac

SEQ ID NO: 17797 - RNA, 144 nt, unidentified
  source 1..144: mol_type = other RNA; note = Related to JAGQPD010000106.1; note = Planctomycetales bacterium
gtcaagcttgtttcgactagccgatgtgccggtggaaactctctggggttaccccagggaaccgtgaaggagtgacatctcgtggcgtgagcaaagatgcgagccttcgcatagccgctcacgcccaaccagactcgttgttgc

SEQ ID NO: 17798 - RNA, 147 nt, unidentified
  source 1..147: mol_type = other RNA; note = Related to CP036289.1; note = Bremerella volcania
gttaagctgatttcctcttcatctgtttcagtgaatgaaatctctccggggataccccggagcaccctgaatggtaagcaattccatcgcttgagcaacgatgcgcctcgcgcatgatggctcaagccagactagacgcgttagcca

SEQ ID NO: 17799 - RNA, 146 nt, unidentified
  source 1..146: mol_type = other RNA; note = Related to QPEW01000030.1; note = Blastopirellula cremea
gttaagctgatttcgatttcattttctgagtgaacgaaatctctccggggctaccccggggcatcctgaatggtaagactttccgtcgcgtgagctgcgatgcgccccacgcattactgctcacgccagactagccgcgttagcca

SEQ ID NO: 17800 - RNA, 146 nt, unidentified
  source 1..146: mol_type = other RNA; note = Related to NZ_QPEV01000005.1; note = Blastopirellula cremea
tccaagctggccttgcttttgcttcggcttcgttaggcctctctggggttaccccaggggatcgtgaatggttagactttccgctgcgtgagtgcccgatgcccgcctaggcatgattcctcacgccgaacgagactcgttggtaa

SEQ ID NO: 17801 - RNA, 143 nt, unidentified
  source 1..143: mol_type = other RNA; note = Related to NZ_CP083740.1; note = Bremerella volcania
gttaagctgggcttgaagaccatcgcgtcgaccaggcctctctggggttaccccaggggatcttcagtggttgtccatttcgccgcgtgagttgacctgcgtttcacgcagaacgactcacgccagaccggattcgttagcca

SEQ ID NO: 17802 - RNA, 144 nt, unidentified
  source 1..144: mol_type = other RNA; note = Related to JAGQOV010001318.1; note = Planctomycetales bacterium
cctaagctggcaaggcgacgcgatggcgttgaaccggcccctttggggttaccccaaggaatttggtagagttggacatgtcggcgcgtgagcgacgaagcgccccgcgcttcacggctcacgccagaccagactcgttaggat

SEQ ID NO: 17803 - RNA, 146 nt, unidentified
  source 1..146: mol_type = other RNA; note = Related to NZ_JH636435.1; note = Schlesneria paludicola
cttctggtttggcaggcttcgtttacgacagccttcctgttcggggcaaccccgaaacattttgtttgacgcgttacagacctgcgcacgaacgtgcggccacgtcaatggccgtaagttcgcgcctcacgagacttggcgaagtg

SEQ ID NO: 17804 - RNA, 136 nt, unidentified
  source 1..136: mol_type = other RNA; note = Related to CP036268.1; note = Planctomycetes bacterium Pan189
cctcggctattggctcgtcacgaacgagtcgccacggggttaccccgcggcttaattcgcaacgacgcatttcggggcacgacggatgatccgctaccacggataattcgtcgcgcatcacgctgctggcgaggtg

SEQ ID NO: 17805 - RNA, 147 nt, unidentified
  source 1..147: mol_type = other RNA; note = Related to JADZEF010000070.1; note = Planctomycetaceae bacterium
tcccggtggttgcggtcggaaccttttccgtgctgcgatctccctgcggttaccgcagggaattgactgtgccctgtccttcacgtcgcgtgagcccctgtccgccttgcggacgacagctcacgcctcacgagctccggcgggaat

SEQ ID NO: 17806 - RNA, 147 nt, unidentified
  source 1..147: mol_type = other RNA; note = Related to JABMPE010000532.1; note = Rhodopirellula sp.
attcagttgggtatggcttccacctggtgtgcaagtcctgcctctgcggggttaccccgtggatgcgattctataccgtcatttcggcgcgtgaccgggaatccagttcctggataataggtcacgcctcacgaggctggtgaatcg

SEQ ID NO: 17807 - RNA, 141 nt, unidentified
  source 1..141: mol_type = other RNA; note = Related to JAGQQF010000113.1; note = Planctomycetaceae bacterium
cttctggtggtggtgaacgacgcgttgcgacgttgaccgttccggggcaaccccggacttgtgagtttgctcccttttcaccgcgtgagccattgtccgctccacggaccaccgctcacgcacaacgggactggcgaagcc

SEQ ID NO: 17808 - RNA, 143 nt, unidentified
  source 1..143: mol_type = other RNA; note = Related to NZ_CP011270.1; note = Planctomyces sp.
cttcggttctcgccgttcggtcgattcgatcggaaggccgctcctgggcaccccaggagcgaaggtggtgctggcagaacgtcgcgtgagcgattgtccgcggctgcggaccgtagctcacgccggacaagactggcgaagca

SEQ ID NO: 17809 - RNA, 133 nt, unidentified
  source 1..133: mol_type = other RNA; note = Related to JACKHO010000006.1; note = Planctomycetaceae bacterium
tccatgcttgtgagatttcatctcacttcgtccgaggtaacctcggagaacaaagtcagcctgatcattgcgaggtacgaacagttctccgcttcacggagtgcagttcgcacgcgaccagttgcgatggaac

SEQ ID NO: 17810 - RNA, 136 nt, unidentified
  source 1..136: mol_type = other RNA; note = Related to NZ_CP036271.1; note = Caulifigura coniformis
cacaagcatcatgttcccttcggggaacgctgcggggttaccccgcggtcgaagcgttgccggccattcgaacgggaatcgacgcgcggtgggcccttccaccgcagcctcgattcgccacaggagtcgttgtgcg

SEQ ID NO: 17811 - RNA, 138 nt, unidentified
  source 1..138: mol_type = other RNA; note = Related to NZ_FOQD01000001.1; note = Planctomicrobium piriforme
cttcagcgggtgattgttttcgaacgatcatcatctcggggacactccgaggactgtgacgcaaccccgcatcgattgcaggagcggccttccgcgtttgcggaaatttgctcccgccagacgaggactggtgaagac

SEQ ID NO: 17812 - RNA, 149 nt, unidentified
  source 1..149: mol_type = other RNA; note = Related to JAFBGL010000010.1; note = Verrucomicrobiaceae bacterium 5K15
gccaagattggtggaatgtgacatctccgatgtaatattccgcctctccggggtaaccccggggcacaggaaagctgagacacggcgcagccaagggctcgtcccactgccatgggagaatcccttggccgtaatggataggttggctc

SEQ ID NO: 17813 - RNA, 128 nt, unidentified
  source 1..128: mol_type = other RNA; note = Related to NZ_NIDE01000017.1; note = Fimbriiglobus ruber
gtcaagccgtgtggcaacacactctccggggttaccccgggggatttcgttacgtgccgattccgtcgcgtgacagccgatccactatgtggataatttgtcacgccctggctgagtcaggttgacgc

SEQ ID NO: 17814 - RNA, 138 nt, unidentified
  source 1..138: mol_type = other RNA; note = Related to NZ_BMXI01000009.1; note = Roseibacillus persicicus
tgcaagacagggagtggcgtcagccatgaccgctccggggctaccccggggactagaaaaaccgaaccgattcgaggcctcgggccttttcacggcctaccgtgaggctgcccgaggcatgaccagactggttgcagg

SEQ ID NO: 17815 - RNA, 163 nt, unidentified
  source 1..163: mol_type = other RNA; note = Related to NZ_ANOH01000392.1; note = Rhodopirellula sp.
accaagttagacatctggtgatcactctcgaaatatcgggagaacatcggtgtcccacgcgaggatacctcgcgggaatcacttgttcagagcattgatcgcgtgagcgattatccgactgccgtcggatttgagctcacgcagcactcggaccggttggcgt

SEQ ID NO: 17816 - RNA, 164 nt, unidentified
  source 1..164: mol_type = other RNA; note = Related to NZ_JACHXU010000006.1; note = Rhodopirellula rubra
accaagtcagacgtctttcgttcgctctcaacctgttgagaaaggcgatggatgtctcacgcgaggttacctcgtgggatagtcacatcagagcattgaaagcatgagcgagcatccgactcccgtcggataatagctcacgcaacactcggaccggttggtgc

SEQ ID NO: 17817 - RNA, 163 nt, unidentified
  source 1..163: mol_type = other RNA; note = Related to JAGQPR010000068.1; note = Planctomycetales bacterium
ttcaagacttgcttcgtatgggatcgacttggtcggtcagtgcatgcgaagtaccacgcgaggttacctcgcgggcgaaagatactctagcgatcgattacgtgagctttcatccgactaccgtcggatactggctcacgcagacacttcgacgggttgaatc

SEQ ID NO: 17818 - RNA, 158 nt, unidentified
  source 1..158: mol_type = other RNA; note = Related to SJPU01000001.1; note = Planctomycetes bacterium Poly21
accaagatcggtgttcgacggttgtgtcagcaacgtcgttgaaagcaccccacgcgaggttacctcgcgggctattttgcgctaggctttgattgcgcgagcaaccatccgtctaccgacggataacggctcgcgcctccacttggacaggttggatt

SEQ ID NO: 17819 - RNA, 157 nt, unidentified
  source 1..157: mol_type = other RNA; note = Related to JADYZV010000153.1; note = Pirellulaceae bacterium
accaagttcgacgtttgcgtaacggcgttttcgcagttgccaaatgttctgcgcgaggttacctcgcgcaatttacttagccaggcactgattgcacgagcaaccttgcgtctaccgacgcaatatggctcgtgcccacactcggaccggttgggaa

SEQ ID NO: 17820 - RNA, 153 nt, unidentified
  source 1..153: mol_type = other RNA; note = Related to CP036526.1; note = Planctomycetes bacterium K23_9
accaagttgattggtagccggatcgattgatacgactgccatttgccgcgaggttacctcgtggtagttgccttacttagcaagttgaccacgcgagcttggctgcgtctgccgacgcagggaagctcgcgcaggacgtggacgagttggcgc

SEQ ID NO: 17821 - RNA, 141 nt, unidentified
  source 1..141: mol_type = other RNA; note = Related to JABDKS010000522.1; note = Pirellulaceae bacterium
acttagctgcacgctgtcgattgtgcgctgatggccacgaggttacctcgtggcagtgacacgactgagcgattgaccgcacgagcttgcctgcgtctaccgacgcagcgaggctcgcgcgagacgcggaccggttggctc

SEQ ID NO: 17822 - RNA, 135 nt, unidentified
  source 1..135: mol_type = other RNA; note = Related to JAGQOZ010000019.1; note = Planctomycetales bacterium
tccaagctgacggagcgtttgccttcgtctccctggggatactccagggtaagatactaactctgatttcatgggcaggtttcctccgcgttgccacgcggaattgacctgcgccagacacggactcgttgggct

SEQ ID NO: 17823 - RNA, 166 nt, unidentified
  source 1..166: mol_type = other RNA; note = Related to JAEUHH010000058.1; note = Verrucomicrobiales bacterium
tccaagctggtgaatctccgtctgcgaacccgtcagggagcgcaggcggcgtcacctttccggggcatccccggggatacgacactccgacccaccgccgcgcgcggcccaaagggcgacaggcctgccgcccgcccggccgcgccggacagggacacgttggggc

SEQ ID NO: 17824 - RNA, 148 nt, unidentified
  source 1..148: mol_type = other RNA; note = Related to VFZW01000070.1; note = Acidobacteria bacterium
tccaagcttggttgaatcggactttcgcaagttcgtttcttccgctccggggataccccggggaccctcgtgggacttagcattcgtcgcgtgagcttcggcgcgtgaggtcgcgcgaacgctcacgctgggctggactcgttggggc

SEQ ID NO: 17825 - RNA, 129 nt, unidentified
  source 1..129: mol_type = other RNA; note = Related to JAGQPM010000203.1; note = Planctomycetales bacterium
cttaagtttgatgaaccttgttcatctctctggggttaccccaggggatcgcgaaggtacgacaacacgaatgtgagcgtcgatgcgtttcacgcatgattgctcacgaaagtcgagactggttaaggc

SEQ ID NO: 17826 - RNA, 145 nt, unidentified
  source 1..145: mol_type = other RNA; note = Related to JAGQPF010000096.1; note = Planctomycetales bacterium
tccaagctcggtgaagtagtgtgtttacgctgcttccctcactgggggtaccccagtgcaacttgaacaacttgccatttcagatgcgagcccgagaaatgcgcttcacgcatgactagctcgcgttgtcaggactcgttggacc

SEQ ID NO: 17827 - RNA, 139 nt, unidentified
  source 1..139: mol_type = other RNA; note = Related to CP042912.1; note = Mariniblastus fucicola
ttcaagctggatgtttcatttcgaaagatcctctgcggggttaccccgtggtttaactggacgttgcaaacgcgtttgcgtgaaagaccgggcgcctaccgacgcccctgatttcactgctggcatgacacgttgaatc

SEQ ID NO: 17828 - RNA, 151 nt, unidentified
  source 1..151: mol_type = other RNA; note = Related to JACRUV010000555.1; note = Planctomycetes bacterium
tccaagatggcaagacctctgaccgtttgcgtcagtgttttgtctctctggggataccccagggcaatgacttgacgatggacatttcgccgcgtgagccggactgcgcggaaacgcagaacagctcacgcacaacgagacgggttggaga

SEQ ID NO: 17829 - RNA, 151 nt, unidentified
  source 1..151: mol_type = other RNA; note = Related to VGYH01000867.1; note = Planctomycetes bacterium
tccaagctggtaagacgccgttccaacgacgggtccgttttgcctctctggggaaaccccaggggatccatttgaccttcacaactgcgccgcatgagcaaccgtgcgcggacgcgcacaaaggctcatgcatgacgagactggttggaga

SEQ ID NO: 17830 - RNA, 146 nt, unidentified
  source 1..146: mol_type = other RNA; note = Related to JAEUIH010000118.1; note = Planctomyces sp.
ttcaggctggcgaaacgttgccttataacaacggcttcgtctctccggggtatccccggggcaatatcttctctgtggcactgcatcgcgtgagggcaagtacgttccacgtacgattcctcacgcgaatcccgtctcgctgaacg

SEQ ID NO: 17831 - RNA, 145 nt, unidentified
  source 1..145: mol_type = other RNA; note = Related to JAGQQS010000555.1; note = Planctomycetaceae bacterium
ttcaggctggcgaatcgttgttttaaataacgacttcgtctctctggggcatccccgggggaataactgctctttggcactgcgtcgcgtgaggggtagtacgctccacgtacatttcctcacgccaatctggtttcgctgaatc

SEQ ID NO: 17832 - RNA, 142 nt, unidentified
  source 1..142: mol_type = other RNA; note = Related to JAEUHE010000137.1; note = Verrucomicrobiales bacterium
tccaagctgatgaagcggacctcggtcggccttcatctctccggggttaccccgggggaacttgtcagtagctcgtttcatcgcgagagccacgctgcgctggcgcgcagatccgctcacgcacaacgggacgcgttggagc

SEQ ID NO: 17833 - RNA, 139 nt, unidentified
  source 1..139: mol_type = other RNA; note = Related to JACPRJ010000368.1; note = Verrucomicrobia bacterium
tccaagccggtgaagttggcttgccatgcttcgcctctccggggttaccccgggggaacgcgacagtgacccgtctcatagcgagagcgtagctacgctgcgcgtaggaccgctcacgcacgacacgacgagttggagc

SEQ ID NO: 17834 - RNA, 149 nt, unidentified
  source 1..149: mol_type = other RNA; note = Related to NZ_CP042997.1; note = Aquisphaera giovannonii
tccaagcgggcggatgggtcgtcgcgaggcggcctcttcgtcgctccggggttaccccgcgagacgttggtgacgcaggcaattcggcgcgtgaggtccactacgcctccgtcgtaggtcccctcacgccggacgagtctggttggagc

SEQ ID NO: 17835 - RNA, 149 nt, unidentified
  source 1..149: mol_type = other RNA; note = Related to NZ_JAALJH010000014.1; note = Aquisphaera sp.
tccaagcgggcggatggatcgtcgcgaggcggtctcttcgtcgctccggggttaccccgcgagacgttggtgagttgggcatttcggcgcgtgaggccagctacgcctccgtcgtagagcacctcacgccggacgagactggttggagc

SEQ ID NO: 17836 - RNA, 147 nt, unidentified
  source 1..147: mol_type = other RNA; note = Related to CP003364.1; note = Singulisphaera acidiphila
cccaagcgggtgaaaccactgtcttcggatggtgggtctcacctctccggggctaccccgggggagcatcttccacggagatcgcagcgcgtgagcggccctacgcttcgcgtagaaatgctcacgcccgacgagactggttggggc

SEQ ID NO: 17837 - RNA, 139 nt, unidentified
  source 1..139: mol_type = other RNA; note = Related to JACKIC010000007.1; note = Planctomycetes bacterium
cccgggcccgggaagccaccctcgtggtgaccttctctctccggggataccccggggcatacccgcatcgccattccgctgcacggagcttcgcggcgccgcgcgccggtgggtccgcgctggaccgacacgccggggc

SEQ ID NO: 17838 - RNA, 151 nt, unidentified
  source 1..151: mol_type = other RNA; note = Related to JAFEGM010000060.1; note = Verrucomicrobia bacterium
tccgggccgaagaagcgaacgtctcctccgaggcgtgcgcctccttctctccggggctaccccgggggatatccgcattgcaaatccaccgcgcggaaggcgatgcgcctgcgtcgcatgagtttccgcgccggacccgcgtcgccggagc

SEQ ID NO: 17839 - RNA, 139 nt, unidentified
  source 1..139: mol_type = other RNA; note = Related to JAGQQE010000253.1; note = Planctomycetaceae bacterium
ctgatgcattttctgcccccaacgttgcctgaccgatcatttctccggggttaccccggggcattttcagcactcgaatttcgtcgcgtgagccatagtacgccggtcgtacaactgctcacgcctgtcaggttcagcc

SEQ ID NO: 17840 - RNA, 142 nt, unidentified
  source 1..142: mol_type = other RNA; note = Related to JAGQPY010000402.1; note = Planctomycetaceae bacterium
atcaggctgatggacggcgttcatgacgtacgattcatctctccggggctaccccggggcatattcctaaccgcgatttcgtaacgtgaggcacggtacgctgcgcgtacgattcctcacgatgctcgagtttcgctgagag

SEQ ID NO: 17841 - RNA, 135 nt, unidentified
  source 1..135: mol_type = other RNA; note = Related to NZ_JAENIJ010000042.1; note = Luteolibacter pohnpeiensis
ctcaagccggtcgtatgattcatcagcgacctctccggggttaccccgggggatcaaaagccaaaccattgcgaggcgagggcctcatcacgctagcacgtgaatatgcccacgccagacgggacacgttgaggg

SEQ ID NO: 17842 - RNA, 136 nt, unidentified
  source 1..136: mol_type = other RNA; note = Related to NEUO01000019.1; note = Verrucomicrobiae bacterium Tous-C4TDCM
gccaagccggtcgtgtggccaccatgcgacctctccggggctaccccgggggatcgacactccgaagcatcacgaggcgagggcccaatcacgctgccgcgtgagaccgcccgcgccagacaggacgcgttggcgc

SEQ ID NO: 17843 - RNA, 139 nt, unidentified
  source 1..139: mol_type = other RNA; note = Related to JAFLEF010000009.1; note = Verrucomicrobia bacterium
tccaagccggcaatgccgacctgttcgtcgttgcctctccggggttaccccgggggatctcgttaatgcctcgtcccagcgcgcgagcgtaattccgcttcacggaaatctgctcccgcccgactcgtcgcgttggagc

SEQ ID NO: 17844 - RNA, 144 nt, unidentified
  source 1..144: mol_type = other RNA; note = Related to JAHWKS010000775.1; note = Planctomycetes bacterium
tccaagccggcgttgcgtcgcatgtcgatcgccaccgtctctccgaggcttcctcgggggagttttctaccgaccgctttgcggtgcgtgagaagccttgcgccgtgcgcaaaatgtctcacgcctgactcgatgcgttggagc

SEQ ID NO: 17845 - RNA, 144 nt, unidentified
  source 1..144: mol_type = other RNA; note = Related to JABGQM010000001.1; note = Verrucomicrobia bacterium
ctcgagtttgataatgcttcgacgtgtttggagtattgtctctccggggttaccccggggtatcacgacagagagccacttcatggcacgagccttactgcaccttgtgcagctccgctcgcgcttcacaggacgggtcgagtg

SEQ ID NO: 17846 - RNA, 144 nt, unidentified
  source 1..144: mol_type = other RNA; note = Related to CP000442.1; note = Burkholderia ambifaria
gtcaagcacacccccggaacaggcagccgatgttccaggaccacggggctaccccgtggatgagaccgacactccgatgcgtcgcaagagcgcaggttgcgcgttgcgcaacgactgctctcgcagcacctgtcacgttgactc

SEQ ID NO: 17847 - RNA, 144 nt, unidentified
  source 1..144: mol_type = other RNA; note = Related to NZ_CP086299.1; note = Burkholderia ambifaria
gtcaagcacacccccggagcaggcagccgatgttccaggaccacggggctaccccgtggatgagaccgacactccgatgcgtcgcaagagcgcaggttgcgcgttgcgcaacgactgctctcgcagcacctgtcacgttgactc

SEQ ID NO: 17848 - RNA, 144 nt, unidentified
  source 1..144: mol_type = other RNA; note = Related to CABVLY010000011.1; note = Burkholderia anthina
gtcaagcacacccccggaacaggcagccgatgttccaggactacggggctaccccgtggatgagatcgacacgccgatgcgtcgcaagagcgcaatttgcgcgttgcgcaaagactgctctcgcagcacctgtcacgttgactc

SEQ ID NO: 17849 - RNA, 144 nt, unidentified
  source 1..144: mol_type = other RNA; note = Related to CP013399.1; note = Burkholderia seminalis
gtcaagcacacacccggaacaggcagtcgatgttccaggaccacggggctaccccgtggatcggatcgacacaccgatgcgtcgcaaggggcccggttgcgcgcggcgcaacgcctcccctcgcagcaccagccacgttgactc

SEQ ID NO: 17850 - RNA, 144 nt, unidentified
  source 1..144: mol_type = other RNA; note = Related to CP015035.1; note = Burkholderia cenocepacia
gtcaagcacacgcccggaacaggcagccgatgttccaggactacggggctaccccgtggatcagatcgatacgccgatgcgtcgcaagtgcgcaagttgcgcgttgcgcaacgaccgctctcgcagcaccagccacgttggctc

SEQ ID NO: 17851 - RNA, 144 nt, unidentified
  source 1..144: mol_type = other RNA; note = Related to CP011301.1; note = Burkholderia cepacia
gtcaagcacacgcccggaacaggcagtcgatgttccaggactacggggctaccccgtggatgagaccgacaccccgatgcgtcgcaagagcgcaggttgcgcgttgcgcaacgactgctctcgcagcacccgtcacgttgactc

SEQ ID NO: 17852 - RNA, 144 nt, unidentified
  source 1..144: mol_type = other RNA; note = Related to NZ_CADFDQ010000020.1; note = Burkholderia pseudomultivorans
gtcaagcacactcccggagcaggcagtcgatgttccaggactacggggctaccccgtggatcagaccgacaccccgatgcgtcgcaagagcgtgagctgcgcgttgcgcagcgcgagctctcgcaggacctgtcacgttgactc

SEQ ID NO: 17853 - RNA, 142 nt, unidentified
  source 1..142: mol_type = other RNA; note = Related to JAAGPL010000085.1; note = Burkholderia sp.
gtcaagcacaccccaggagcaggcaatcgatgttcccggactacggggctaccccgtggatgagatcgactccccgatgcgtcgcaagagcccgattgcgcgttgcgcaaagcagctctcgcagcaccgcgcacgttgactc

SEQ ID NO: 17854 - RNA, 142 nt, unidentified
  source 1..142: mol_type = other RNA; note = Related to NZ_SMRO01000001.1; note = Paraburkholderia flava
gtcaagcacacgccgggaacaggcagccgatgttccaggactacggggctaccccgtggatgaggtcgactcaccgatgcatcgcaagagccggactgcgcgctgcgcagggcggctctcgcagcaccaggcacgttgactc

SEQ ID NO: 17855 - RNA, 141 nt, unidentified
  source 1..141: mol_type = other RNA; note = Related to NZ_JACBNX010000003.1; note = Burkholderia guangdongensis
gtcaagcacaccccggaacaggcaaccgatgttcccggactacggggctaccccgtggatgagatcgactccccgatgcgtcgcaagagcccggttgcgcgttgcgcaaagccgctctcgcagcaccgagcacgttggctc

SEQ ID NO: 17856 - RNA, 143 nt, unidentified
  source 1..143: mol_type = other RNA; note = Related to CP013414.1; note = Burkholderia ubonensis
gtcaagcacacccccggagcaggcagcgcatgttccaggactacggggctaccccgtggatgagatcgactccccgatgcgtcgcaagagccgcgattgcgcgttgcgcaagacagctctcgcagcaccaggcacgttgactc

SEQ ID NO: 17857 - RNA, 140 nt, unidentified
  source 1..140: mol_type = other RNA; note = Related to VWWJ01000001.1; note = Burkholderia sp.
gtcaagcacgacccgggatcaggcagcacgctcccggacggcggggctaccccgccgatgactcgcaagtcgcaatacatcgcaagagcggcgttgcgctgacgcgcaaatgagctctcgccagactggcacgttgatcc

SEQ ID NO: 17858 - RNA, 139 nt, unidentified
  source 1..139: mol_type = other RNA; note = Related to NZ_CP046915.1; note = Paraburkholderia acidisoli
gtcaagcatgacccgggagcacgcagtgcgttccggacggcggggttaccccgccgatgactcgcaagccgtactacatcgccagcgccacgttgcgcatgcgcgcaagaacgcgctagccagactggcacgttgactc

SEQ ID NO: 17859 - RNA, 137 nt, unidentified
  source 1..137: mol_type = other RNA; note = Related to LMPF01000021.1; note = Burkholderia sp.
gtcaagcacataacgggagaatcagtgcatcccgacggtggggttaccccgccgatgactcgtaagtcgcaatacatcgcaagagcggccttgcgcatgcgcgcaacttggctctagccagactggcacgttgattc

SEQ ID NO: 17860 - RNA, 141 nt, unidentified
  source 1..141: mol_type = other RNA; note = Related to JAAGPF010000151.1; note = Burkholderia sp.
gccaagcggacctcgggagcacgcttgatcgtttcccgaacgacggggttaccccgtcgttgcaacgcacatggcaatacgtcgcaggagccttgctgcgcttcgcgcagggcagctccagccagaccggcacgttgactc

SEQ ID NO: 17861 - RNA, 142 nt, unidentified
  source 1..142: mol_type = other RNA; note = Related to NZ_MTZV01000006.1; note = Paraburkholderia acidicola
gtcaagcacaccccgggagcaggcaaccgatgttcctggactacggggttaccccgtggctgatttccagtttgcattacgtcgcaagagccagcgttgcgcgctgcgcaagatagctctcgcagaactagcgcgttgattc

SEQ ID NO: 17862 - RNA, 141 nt, unidentified
  source 1..141: mol_type = other RNA; note = Related to NZ_CADFGU010000011.1; note = Robbsia andropogonis
atcaagcttattcctcgggcgctgtcattttggcccaggaccacggggctaccccgtggatgatttggatgtcgcattgcaccgcaagagccccgttgcgcacggcgcaagcccgctctcgccacaccggtacgttgattc

SEQ ID NO: 17863 - RNA, 144 nt, unidentified
  source 1..144: mol_type = other RNA; note = Related to FNCJ01000001.1; note = Paraburkholderia phenazinium
gtcaagcttgccaaggaccgggcagtcaacgttccaggcactacggggctaccccgtggatcagcatgatctccgcagttcgtcgcatgagcccgctttgcgtgctacgcaagaccgctcacgcagcactagacgcgttgactc

SEQ ID NO: 17864 - RNA, 144 nt, unidentified
  source 1..144: mol_type = other RNA; note = Related to QVQV01000003.1; note = Paraburkholderia sp.
gtcaagcttgccggggtacgggaaggatacgttccaggcactacggggttaccccgtggatcagcatgatctccgcagttcgtcgcatgagccttctccacgccttgcgtagctgggctcacgcagcaccagtcgcgttgactc

SEQ ID NO: 17865 - RNA, 143 nt, unidentified
  source 1..143: mol_type = other RNA; note = Related to NZ_SNVI01000001.1; note = Paraburkholderia dipogonis
gtcaagcacgcctggatgctggccacataggttccgggcaccacggggctaccccgtggatcaacactactccgcagttcgtcgcatgagcctcagttgcgtcttacgcaagagcgctcacgcagcacaagacgcgttgactg

SEQ ID NO: 17866 - RNA, 143 nt, unidentified
  source 1..143: mol_type = other RNA; note = Related to FNTG01000001.1; note = Burkholderia sp.
gtcaagcacccctcgaggcaagcgacatcggttccgggcaccacgaggctaccccgtggatcaacactactccgcagttcgtcgcgtgagcctcagttgcgtgttacgcaagagcgctcacgcagcacaagacgcgttgactg

SEQ ID NO: 17867 - RNA, 144 nt, unidentified
  source 1..144: mol_type = other RNA; note = Related to NZ_QLTK01000012.1; note = Paraburkholderia bryophila
gtcaagcacgcctgagttcgggcagcatacgttccgggcactacggggctaccccgtggattagcatgacctccgcacttcgtcgcatgagcgtcacttgcgctgtgcgcaacacggctcacgcagcacaagaagcgttgactg

SEQ ID NO: 17868 - RNA, 145 nt, unidentified
  source 1..145: mol_type = other RNA; note = Related to NZ_CP024941.1; note = Paraburkholderia terricola
gtcaagcttgccccggttcgggccgcatacgttccgggcactacggggctaccccgtggatcagaatgacctccgcagttcgtcgcatgagcccgttgttgcgcgttgcgcaaatacgctcacgcagcacaagacgcgttgactg

SEQ ID NO: 17869 - RNA, 144 nt, unidentified
  source 1..144: mol_type = other RNA; note = Related to CP010026.1; note = Paraburkholderia fungorum
gtcaagcttgccagggtacaggcagtattcgttccgggcactacggggctaccccgtggattagaaagacctccgcagttcgtcgcatgagcgtgacttgcgcattgcgcaaacgagctcacgcagcacaagacgcgttgactg

SEQ ID NO: 17870 - RNA, 144 nt, unidentified
  source 1..144: mol_type = other RNA; note = Related to NZ_CAJHCR010000004.1; note = Paraburkholderia kirstenboschensis
gtcaagcttgctcaggtgcgggcagcttacgttccgggcactacggggttaccccgtggatatgaatgacctccgcagttcgtcgcatgagcctgatttgcgcgttgcgcaatgcagctcacgcagcacaagacgcgttgactg

SEQ ID NO: 17871 - RNA, 152 nt, unidentified
  source 1..152: mol_type = other RNA; note = Related to NZ_JAGKQQ010000001.1; note = Gemmata sp.
gccgagcacgatggcaacatggttcgcgagaaccgtgtccgccatcgctccggggttaccccggagaccttttatcacttgggactgcaggcgcgcgacagcccgggcgcttccacgcccccgatgtcgcgcgggacgggactcgtcgaccc

SEQ ID NO: 17872 - RNA, 152 nt, unidentified
  source 1..152: mol_type = other RNA; note = Related to NZ_LR593886.1; note = Gemmata sp.
gccgagcacggtggccgagatggttcgtaagagcccaatttgccatcgctccggggttaccccggggctttccacaacctggtactgcaagcgcgcgacagcttgggcgcttccacgcccgtcttgtcgcgcgagacaagactcgtcggccc

SEQ ID NO: 17873 - RNA, 149 nt, unidentified
  source 1..149: mol_type = other RNA; note = Related to VGZJ01000033.1; note = Planctomycetes bacterium
gccgagcacggcgggacgcgggttcgctgaaccggccgaacgccactccggggttaccccggggtgcgcccaacacgtgacagacgagcgcgcgacgaactgggcgcttccacgcccgccccgtcgcgccggccgagactcgtcggccc

SEQ ID NO: 17874 - RNA, 151 nt, unidentified
  source 1..151: mol_type = other RNA; note = Related to PNKH01000003.1; note = Isosphaera sp.
cccgagcacgccgccgtcgtgtccgcaggggcgcaacgggccggcacgccggggttaccccggtggtcgcacaccacctgtcccagccagcgcgcgacagactgggcactaccgtgcccgccgtgtcgcgccggacgagactcgtcgggcc

SEQ ID NO: 17875 - RNA, 150 nt, unidentified
  source 1..150: mol_type = other RNA; note = Related to JAFKFQ010000274.1; note = unidentified bacterium
cccgagtctcgtcgtccgttggtccgcaagaatcgacggccggcacgccggggttaccccggcgcaggttcgtaacccgagtcggttggcgcgcgacggcgggggcactcccatgcccgtcccgtcgcgccggacaggaccggtcgggtc

SEQ ID NO: 17876 - RNA, 150 nt, unidentified
  source 1..150: mol_type = other RNA; note = Related to JAIEQO010001050.1; note = Gemmataceae bacterium
cccaagcccggcaggcgctccgcccgcgagggcggggcggttgctgccccggggataccccgggggcctttcctcacttgagccgctcggcgcgcgacggcgggggcgctccacgcccgacccgtcgcgccggaccggactcgttggggc

SEQ ID NO: 17877 - RNA, 150 nt, unidentified
  source 1..150: mol_type = other RNA; note = Related to JAFATI010001257.1; note = Planctomycetes bacterium
ctcaagacgacgataccgttgttgcctcaacagcggttagggtctcttcggggctaccccgggggagcggtttcgttaccacaggacgccgcgcgaccttccctgcgctaccacgcagcccaggtcgcgcttcacgagttaggttgggac

SEQ ID NO: 17878 - RNA, 143 nt, unidentified
  source 1..143: mol_type = other RNA; note = Related to JACPPF010000025.1; note = Planctomycetes bacterium
ttcaagaagacgccaggctgtttcggcagcgtgggtgtctgtgcggggctaccccgcgcgtgcgacaatcccgagcgttccagcgcgcggcctcggcctgcgcttcacgcagataaggccgcgcgagacgagaaggttgaatg

SEQ ID NO: 17879 - RNA, 137 nt, unidentified
  source 1..137: mol_type = other RNA; note = Related to NZ_CP011125.1; note = Sandaracinus amylolyticus
gtcgagccgatcgaggcgcacgcctcggtctccgcgaggcttcctcgcggacgcttcgtacctccagcatcgacgtcgcacgtgccccggctgcggaaccgcagcgaccgcacgcgcaggaccggaatcgtcgacgc

SEQ ID NO: 17880 - RNA, 146 nt, unidentified
  source 1..146: mol_type = other RNA; note = Related to JACPFM010000079.1; note = Deltaproteobacteria bacterium
accaagacggtggcgagtggtcttcggatcgcgcgccgcctctccggggcaaccccgggggtgctccttcagccacgcagggcaacgcgtgacccacgctgcgcgctggcgcaggactggtcacgcacgacgagatcggttggccg

SEQ ID NO: 17881 - RNA, 140 nt, unidentified
  source 1..140: mol_type = other RNA; note = Related to JABFXX010000467.1; note = Kofleriaceae bacterium
accaagcaggtgatcggccactggttggtcacctctccgcggtaaccgcggggatgctgtacgagtacgagagtgcgatgcacgcgatcgggctgcgcgaaacgcaggtcctcgcgtggcgagacgagactggttggtac

SEQ ID NO: 17882 - RNA, 127 nt, unidentified
  source 1..127: mol_type = other RNA; note = Related to JADJMO010000033.1; note = Myxococcales bacterium
accaagcaggcggactccgcctctccggggcaaccccggggacgatccatcaccgaacacggccacggcccgacgggcggcgcgcggttgcgcgcgattcgtcgcgcaggacgagcaccgttggtct

SEQ ID NO: 17883 - RNA, 126 nt, unidentified
  source 1..126: mol_type = other RNA; note = Related to JAGQJB010000072.1; note = Myxococcales bacterium
tccgagccggtgatcgctcaccgcttcggggctaccccgagggcacttcgtcaggtaccgatccagcgcccggcccgggctgcgcgatacgcagggctggccgggccagaccagtcacgtcggagc

SEQ ID NO: 17884 - RNA, 148 nt, unidentified
  source 1..148: mol_type = other RNA; note = Related to JADJOY010000023.1; note = Deltaproteobacteria bacterium
ctcgagccggtagccagcgctttcgagcacgaggcgcctccgcggggataccccgcgggaagattcacagctgaccattccatcgcacggaggtccgtgcgcgccctggcgcgcactcgtctccgcgcaccacgggcctcgtcgaggg

SEQ ID NO: 17885 - RNA, 144 nt, unidentified
  source 1..144: mol_type = other RNA; note = Related to JAHBWB010000013.1; note = Labilithrix sp.
tccaagccggcaacggttcgcctcgcgcggacctcagcctctccgaggttacctcgggggacgttcgtaagtgtggttctcagcgcgtgagacacggggcgccaggacgcccgacctctcccgcatcacgggtctcgttggagc

SEQ ID NO: 17886 - RNA, 145 nt, unidentified
  source 1..145: mol_type = other RNA; note = Related to MKVQ01000030.1; note = Myxococcales bacterium 68-20
ttcaagccggcatggccttcgcctcgcgcgaagctctgcctctccgaggctacctcgggggatgttcgtgagtatggctctcagcgcaagacgcgcggggcgccaagacgcccgacacgtcgtgcaacacgggtctcgttggagt

SEQ ID NO: 17887 - RNA, 132 nt, unidentified
  source 1..132: mol_type = other RNA; note = Related to JABFRG010000265.1; note = Polyangiaceae bacterium
ttcggggcgagcgcggtgccgagccgcttcggggtgaaccccgaggacgacgacgtggatacacagcgcatcgcgcgagggagagtgcggacgaccgcacgacctctcgcgccggacgagaccggttgatgc

SEQ ID NO: 17888 - RNA, 154 nt, unidentified
  source 1..154: mol_type = other RNA; note = Related to JAHBWD010000001.1; note = Labilithrix sp.
gtcgagtgggaagagcgcttctccgatctcggatcggtaggcgcgaatcctcgccggggttaccccggcgcacgcgtacgatcgagcattgcagcgcatgaggcacggtccgccagacggacgacccctcacgcaagacgagacaggtcgacgc

SEQ ID NO: 17889 - RNA, 146 nt, unidentified
  source 1..146: mol_type = other RNA; note = Related to JAGQIZ010000167.1; note = Myxococcales bacterium
cccgagcccttgggctcatccctcgtggattgggctgtcgctctccggggttaccccggggaaacgtcatgactttggcattcgtctcgcgaggaacggcccgcgttcacgggcgacccctcgctagggaccagacacgtcgagcg

SEQ ID NO: 17890 - RNA, 140 nt, unidentified
  source 1..140: mol_type = other RNA; note = Related to JACQYO010000099.1; note = Deltaproteobacteria bacterium
tccgagcttgcggtgcgggtctacgcatcggctctccggggctaccccggggaattcttgagactaggcaactcagcgcgcgagcttcgctgcatccctaatgcaggactgctcgcgcctcgacgagatcacgtcggggc

SEQ ID NO: 17891 - RNA, 127 nt, unidentified
  source 1..127: mol_type = other RNA; note = Related to BJHF01000062.1; note = Deltaproteobacteria bacterium
gccgagccggtgagcttcaccactccggggaaaccccggggatccctcgttaccttgggcacccgtcgcaggaccctgagtgcgcattcacgcacgtctggtcctgcccgacggggcgcgtcgggcg

SEQ ID NO: 17892 - RNA, 146 nt, unidentified
  source 1..146: mol_type = other RNA; note = Related to JADZFZ010000151.1; note = Deltaproteobacteria bacterium
cccgagcaggtgttcgttcgccggagacggcgagcgcacctcttcggggtcaccccgaggacacgaccacggcagaaggctccatcgcacgagcggagccgcgccacgacgcggagctgctcgcgcttcacgagaatcgtcgggac

SEQ ID NO: 17893 - RNA, 147 nt, unidentified
  source 1..147: mol_type = other RNA; note = Related to NZ_RAWM01000011.1; note = Corallococcus interemptor
acccagcaggtagacggtccgtggcgacacggtcccctgcctctccggggtacccccggggattcttcaagcggagcacttccccacgcatggccgacctcgcggcaagccgcgacgctggccacgccagacgggacaggtgggacc

SEQ ID NO: 17894 - RNA, 147 nt, unidentified
  source 1..147: mol_type = other RNA; note = Related to NZ_CP079946.1; note = Corallococcus sp.
acccagcaggtagcaggtccgtggagacacggtcccctgcctctccggggtacccccggggaatccatacacggagcacttccccacgcgtggccgaccccgcggcaagccgcgaccctggccacgccagacgggacaggtgggacc

SEQ ID NO: 17895 - RNA, 147 nt, unidentified
  source 1..147: mol_type = other RNA; note = Related to NZ_VIFM01000112.1; note = Myxococcus sp.
acccagcgggtagacggtccgtggtgacacggtccgctgcctctccggggtacccccggggaatgatttcgaggagcacagccccacgcgaggccgggactgcggcgagccgcagtgcgggccacgccagacgggacaggtgggtcc

SEQ ID NO: 17896 - RNA, 147 nt, unidentified
  source 1..147: mol_type = other RNA; note = Related to NZ_CP071091.1; note = Myxococcus sp.
acccagcgcgtagacggaccgtggagacacggcccgctacttctccggggtacccccggggagtcttctcgaggagcacatccccacgcgaggccgggtccgcggcaagccgcgactcgggccacgccagacggggcaggtgggcgc

SEQ ID NO: 17897 - RNA, 147 nt, unidentified
  source 1..147: mol_type = other RNA; note = Related to NZ_FOIB01000009.1; note = Myxococcus fulvus
acccagcgcgtagacggtccgtggtgacacggccttctgcttctccggggtacccccggggagtcgtcatgaggaacacactcccacgcgaggccggtatcgcggcgagccgcgactctggccacgccagacgggacaggtgggccc

SEQ ID NO: 17898 - RNA, 146 nt, unidentified
  source 1..146: mol_type = other RNA; note = Related to NZ_JAAIYA010000009.1; note = Pyxidicoccus sp.
ctcaaggggtgacgcagtcgtcttcgggcggcgcgttccctctccggggctaccccggggatgccgtgggacgtcggacttcacagcacatgcccggtagtgcgcgttgcgcaccgcggggcacgtaggacaggacaggatggggc

SEQ ID NO: 17899 - RNA, 148 nt, unidentified
  source 1..148: mol_type = other RNA; note = Related to JADYYK010000281.1; note = Deltaproteobacteria bacterium
cgcgagctggggaggtcgccatcgcgagatggagaccgaacctctccggggttcccccggggcaacttcgcggacagggcaagacggcgcgtgaccctcgctgcgcttcacgcagatccggtcgacgcaggacgagatcggtcgcgag

SEQ ID NO: 17900 - RNA, 132 nt, unidentified
  source 1..132: mol_type = other RNA; note = Related to DOEP01000754.1; note = Planctomycetes bacterium
ctcgagttcgctcggaacgatccgggactctggggttaccccaggggcagagtgttgactcaagaacgccaactcacgacggcccgtgcgcttgcacgcaccggtcgtcgcgtggggtgagacggtcggggc

SEQ ID NO: 17901 - RNA, 139 nt, unidentified
  source 1..139: mol_type = other RNA; note = Related to JAHBXY010000029.1; note = Planctomycetes bacterium
cccaagacggtccgtggtcctcggacgacggacgctccggggataccccggggcctgaccatgacgaacacgtgtcgacgcatggcctccggtgcgacgggtcgcacgaccggccacgccggacgcgacaggttggggc

SEQ ID NO: 17902 - RNA, 144 nt, unidentified
  source 1..144: mol_type = other RNA; note = Related to JAJTCO010000005.1; note = Pseudoduganella sp.
ttcaagccggcctgtcttttgcctcgcgcagggacagcctctacggggctaccccgtgggatgctttttgttccgcacttcgccgcatgagcggcattgcgctggcgcgcaaccatgctcacgcatcacgagactcgttgaagg

SEQ ID NO: 17903 - RNA, 144 nt, unidentified
  source 1..144: mol_type = other RNA; note = Related to NZ_LMDJ01000008.1; note = Massilia sp.
ttcaagccggcctgtccctgcttcgtgcagggacagcctctacggggctaccccgtggtaacttgattggttcagcatttcgccgcatgggcctggttgcgctttcgcgcaaagccgctcacgcatcacgagactcgttgaagg

SEQ ID NO: 17904 - RNA, 143 nt, unidentified
  source 1..143: mol_type = other RNA; note = Related to NZ_CP086370.1; note = Massilia sp.
ttcaagccggcctgtcactgcctcgtgcagggacagcctctacggggctaccccgtgggacattgattgttcagtacttcgccgcctgggccgcgttgcgcttccgcgcaagacagcccacgcatcacgagactcgttgaagg

SEQ ID NO: 17905 - RNA, 142 nt, unidentified
  source 1..142: mol_type = other RNA; note = Related to NZ_AUDI01000016.1; note = Pseudoduganella violaceinigra
ttcaagccggcctgtccttgcctcgcgcagtgacagcctctacggggctaccccgtgggatattttttgctcagcatttcgccgcatgagagtccttgcgctccgcgcaacgaaactcaagcatcacgagactcgttgaagg

SEQ ID NO: 17906 - RNA, 142 nt, unidentified
  source 1..142: mol_type = other RNA; note = Related to NZ_WNKX01000014.1; note = Massilia eburnea
ttcaagccggcctgtccctgccgcgtgcagggcacgcctctgcggggctaccccgtgggatgttgattgatctgcatttcgccgcatgagcgccattgcgttccacgcaaacatgctcacgcatcacgagactcgttgaagg

SEQ ID NO: 17907 - RNA, 142 nt, unidentified
  source 1..142: mol_type = other RNA; note = Related to LMDB01000012.1; note = Duganella sp.
gccaagccggcctgtctttgcttcgtgcagggacagcctctgcggggttaccccgcgggatgtttgatgttctgcatttcgccgcatgagtggcattgcgcttcgcgcaaccatacgcacgcttcacgagactcgttggcgg

SEQ ID NO: 17908 - RNA, 143 nt, unidentified
  source 1..143: mol_type = other RNA; note = Related to CP051684.1; note = Duganella sp.
ttcaagccggcctgttcttgccgcgtgcaggaacagcctctgcggggttaccccgtgggatatttattgttcagcacttcaccgcctgagccccgttgcgctagcgcgcaagatagctcacgcatcacgagactcgttgaagg

SEQ ID NO: 17909 - RNA, 143 nt, unidentified
  source 1..143: mol_type = other RNA; note = Related to NZ_WKJN01000036.1; note = Duganella alba
ttcaagccggcctgttcttgccgcgtgcagggacagcctctgcggggctaccccgtgggatattgattgttcagcacttcgccgcctgagccgcgttgcgctcccgcgcaagacagctcacgcatcacgagactcgttgaaag

SEQ ID NO: 17910 - RNA, 143 nt, unidentified
  source 1..143: mol_type = other RNA; note = Related to WHUF01000005.1; note = Rugamonas rivuli
ttcaagccggtctgtctttgcctcgtgcagggacagcctctacggggctaccccgtgggatgtttaatgttcagcacttcgccgcatgagccgcgttgcgtttccacgcaagactgctcacgcatcacgagactcgttgaagg

SEQ ID NO: 17911 - RNA, 142 nt, unidentified
  source 1..142: mol_type = other RNA; note = Related to QVIN01000001.1; note = Duganella sp.
ttcaagccggcctgtctttgcttcggcagggacagcctctacggggctaccccgtgggatgtttaatgttcagcacttcgccgcatgagcgccgttgcgctaccgcgcaagacagctcacgcatcacgagactcgttgaagg

SEQ ID NO: 17912 - RNA, 143 nt, unidentified
  source 1..143: mol_type = other RNA; note = Related to QVIO01000002.1; note = Duganella sp.
ttcaagccggcctgtctttgccgcgtgcagggacagcctctacggggctaccccgtgggatgtttaatgttcagcacttcgccgcatgagccgcgttgcgttaccacgcaagttagctcacgcatcacgagactcgttgaagg

SEQ ID NO: 17913 - RNA, 143 nt, unidentified
  source 1..143: mol_type = other RNA; note = Related to NZ_WWCJ01000021.1; note = Massilia guangdongensis
tccaagccggcctgttcttgccttgtgcatggacagcctctgcggggctaccccgcgggatattgaaggtcctgctttacgccgcatgagcgtctttgcgctaccgcgcaactctgctcacgcatcacgagactcgttgaagg

SEQ ID NO: 17914 - RNA, 144 nt, unidentified
  source 1..144: mol_type = other RNA; note = Related to JACMNR010000433.1; note = Bdellovibrionales bacterium
ttcaagccggcacgactttaccctgtgtaaagaattgcctccgcggggttaccccacgggatattcattgcttcgcatttcaccgcatgagcgaccgtgcacaaaaacgcaccttggctcacgcatcacgagactcgttgaagg

SEQ ID NO: 17915 - RNA, 144 nt, unidentified
  source 1..144: mol_type = other RNA; note = Related to WHJH01000043.1; note = Massilia mucilaginosa
ttcaagccggcctgttcttgcctggtgcagggacatgcctctgcggggctaccccgtgggaactatattgctgtgcaattcaccgcatgagccgccgtgcgctgccgcgcacttaagctcaagcttcacgagactggttgaagg

SEQ ID NO: 17916 - RNA, 141 nt, unidentified
  source 1..141: mol_type = other RNA; note = Related to FQWU01000004.1; note = Massilia sp.
ttcaagcagacaggctttcgtcttgtaaaaggcgagtctccatggggttaccccatgaaatttttaatgttttgcatttcatcgcaagagattctgtgtgcttcgcacacgggcactcgagcgtcacaagtacgttgaagg

SEQ ID NO: 17917 - RNA, 143 nt, unidentified
  source 1..143: mol_type = other RNA; note = Related to NZ_CP013232.1; note = Collimonas fungivorans
ttcaagccggcgcgctgttacctcgtgtaatggaacgcctctgcggggctaccccgcgggatattttggcttggcaatgcaacgcatgagcggcgctgcaccacggtgcagatatgctcacgcatgacgggactggttgaagg

SEQ ID NO: 17918 - RNA, 144 nt, unidentified
  source 1..144: mol_type = other RNA; note = Related to FOLC01000015.1; note = Collimonas sp.
ttcaagccggcgcactgttaccttgtgtaatgggacgcctctgcggggttaccccgcgggatattttggctgggcaatgcaacgcatgagcggccctgcaccacggtgcaggctcggctcacgcatgacgggactggttgaagg

SEQ ID NO: 17919 - RNA, 143 nt, unidentified
  source 1..143: mol_type = other RNA; note = Related to PDBX01000001.1; note = Collimonas sp.
ttcaagtcggcgtgctgttacctggtgtagcggagcgcctctgcggggctaccccgtgggatattttggcttggcaatgcagcgcatgagcggcgctgcaccctgatgcaggtttgctcatgcatgacgggactggttgaagg

SEQ ID NO: 17920 - RNA, 143 nt, unidentified
  source 1..143: mol_type = other RNA; note = Related to JACOUL010000024.1; note = Burkholderiales bacterium
ttcaagtcggcgcgatgtcacctcgtgtgatgaaacgcctctgcagggctaccctgcgggacatttttgattgggcaatgcaacgcatgagccgaactgcacgctgtgcaggactgctcatgcataacaagactggttgaagg

SEQ ID NO: 17921 - RNA, 138 nt, unidentified
  source 1..138: mol_type = other RNA; note = Related to NZ_QJKB01000006.1; note = Undibacterium pigrum
tgcaagctggcgctcagacgcaagtccatagtgcctctgcggggttaccccgcgggataaatttacctggtatttcatcgcgtgagccgccctgcacttcatgcagattggctcacacttgacgagactggttgcagg

SEQ ID NO: 17922 - RNA, 150 nt, unidentified
  source 1..150: mol_type = other RNA; note = Related to JAKZHX010000011.1; note = Undibacterium sp.
ttcaagcctggtgcacagatgcagttcaccgcaaatcaaatgcacctctgcggggttaccccgcaggacagacagacctggtatttcatcgcgtgagccgccttgcactgacgtgcaaacaggctcacacttcacaagactggttgaagg

SEQ ID NO: 17923 - RNA, 144 nt, unidentified
  source 1..144: mol_type = other RNA; note = Related to JAGOHT010000005.1; note = Alphaproteobacteria bacterium
tgcaagcttggccggtgtttttgcatccaaagacaccgccgctccggggttaccccggggacttattttaaggcaccaatacagcccatgagcgaccctgcacgttgtgcagcgcagctcatggcagacgagactggttgcaca

SEQ ID NO: 17924 - RNA, 148 nt, unidentified
  source 1..148: mol_type = other RNA; note = Related to NZ_JONR01000045.1; note = Nevskia soli
ttcaagctggcaggcaagtcctctgtacgtagacttcttgcctctccggggttaccccggggttggttcctgatggtggcaaaatcgtcccacgagcgggtctgcacgaggtgcagtgcggctcgtggacaacgcgactggttggaga

SEQ ID NO: 17925 - RNA, 156 nt, unidentified
  source 1..156: mol_type = other RNA; note = Related to JAEUMY010000023.1; note = Betaproteobacteria bacterium
tccaagcggatggtgattgcgtaggtttccttttcgcagtcatatctctccggggataccccggggttcttgatgtacccaggcaattcgtctcatgagccgcgttgcacgacaagcgcgcaaagatggctcatgaatgactcgacaggttggagc

SEQ ID NO: 17926 - RNA, 143 nt, unidentified
  source 1..143: mol_type = other RNA; note = Related to NATR01000129.1; note = gamma proteobacterium symbiont of Ctena orbiculata
tccgagcggttccacgagatttgcacgcaaacccgtggaagactccggggttaccccggggtggcgttatagctgacatttcattgccggtacggcactgcgcttcacgcagtgttgtacaggcccgacgagcaggtcggagg

SEQ ID NO: 17927 - RNA, 146 nt, unidentified
  source 1..146: mol_type = other RNA; note = Related to NZ_MARB01000009.1; note = Candidatus Thiodiazotropha endolucinida
tccgagcagttccgcgactatggcacgccaaggtcgccggacactccggggctaccccggggtagcgttatagccaacatttccgttgctggtaccacgttgcgcttcacgcaagagggtaccagccatacgagcagggtcggagg

SEQ ID NO: 17928 - RNA, 149 nt, unidentified
  source 1..149: mol_type = other RNA; note = Related to JAGRGZ010000050.1; note = Gammaproteobacteria bacterium
ttcgagcggttccatggcctggcgatgccggggttctggaacgctccggggttaccccggggatgcctggttcagtctgacaatgcattgccggtacaccactgcgctgcacgcagatgctgtaccggcgggacgagagtggtcgaagg

SEQ ID NO: 17929 - RNA, 148 nt, unidentified
  source 1..148: mol_type = other RNA; note = Related to JAGRGX010000033.1; note = Gammaproteobacteria bacterium
tccgagtattacccagagcgtcgtcttggcgatgtccgcgggtgctccggggaaaccccggggttctgatttcactcgcacactgcgtggccggtacgtcactgcacgtcgtgcagaaacgcaccggcacaaccggcatggtcggagg

SEQ ID NO: 17930 - RNA, 149 nt, unidentified
  source 1..149: mol_type = other RNA; note = Related to JAGRGY010000021.1; note = Gammaproteobacteria bacterium
tccgagctcaccccggttcccgccatcggcgtggccgcgggcgctccggggaaaccccgggggacgtctcgtctaccgacacatctcgccgccggtacgtcgctgcacggcgtgcagacacgtaccggcccgacaggcctcgtcggagg

SEQ ID NO: 17931 - RNA, 146 nt, unidentified
  source 1..146: mol_type = other RNA; note = Related to SCTB01000034.1; note = Alphaproteobacteria bacterium
ttcgagatattccgcgttcaacttcggttggattgaggaattctccggggttaccccggggaagagtttttccgaggacatttcgtgtccggtgcgtccctgcacgttgtgcagcacggcaccggaaataccagaattgtcgaagg

SEQ ID NO: 17932 - RNA, 150 nt, unidentified
  source 1..150: mol_type = other RNA; note = Related to WGNE01000059.1; note = Alphaproteobacteria bacterium
tccgagacgttcctgattttgacttttgttgaacgaaggaactctccggggttaccccggggaatggtttttgcctggacatatcatgtccggtgcgtccctgcgcctttacgcgcagcgcggcaccggaaacacgagaagcgtcggagg

SEQ ID NO: 17933 - RNA, 145 nt, unidentified
  source 1..145: mol_type = other RNA; note = Related to PBDO01000002.1; note = Pseudomonadales bacterium
tccgagcgtttcatcacggggcttggccccagggtgaaagctccggggttaccccgggggcgattcaacagtaagaacacaccgtagttggtacggcgcttcgctgcacgcagtaccgtactgaatggaccagactggtcggaga

SEQ ID NO: 17934 - RNA, 130 nt, unidentified
  source 1..130: mol_type = other RNA; note = Related to NZ_AONC01000057.1; note = Imhoffiella purpurea
cccgaggcggccgcgatcggcggcctctccggggctaccccgggggagatccccaaccaggcattccgacgcacgtgcgtccctgcgctccgcgcagggctgcacgcgcctccacgagacgggtcggggc

SEQ ID NO: 17935 - RNA, 130 nt, unidentified
  source 1..130: mol_type = other RNA; note = Related to JAAIJQ010000073.1; note = Thiorhodococcus minor
cccgaggtggccagcatcatcggcctctccggggctaccccgggggcgattcccaaccaggcagtccagtgcacgggcgaccctgcgctccacgcagggctgcccgcgcgcccacgagacgggtcggggc

SEQ ID NO: 17936 - RNA, 146 nt, unidentified
  source 1..146: mol_type = other RNA; note = Related to JAGRGW010000386.1; note = Gammaproteobacteria bacterium
tccgagattgcccgtactcaccgccatgaggcgtgttcgggcactccggggataccccggggttattttccatacaagcaacacagcgcacggacggcgctgcgccttgcgcagctttgtccgcgcaaagagagcagggtcggagt

SEQ ID NO: 17937 - RNA, 135 nt, unidentified
  source 1..135: mol_type = other RNA; note = Related to LUKZ01000009.1; note = Acidovorax sp.
gccaagcatgtcgagcctgcacaggttcgggccatggggcagccccacggtgttctcctcatacgcccacattggggcgcgcgaaccagccgccaccggtggcaaacagttcgcgcccaacccgctggttggtac

SEQ ID NO: 17938 - RNA, 135 nt, unidentified
  source 1..135: mol_type = other RNA; note = Related to NZ_NOIG01000002.1; note = Acidovorax kalamii
gccaagcatgtcgagcctgcacaggttcgggccgtggggcagccccacggtgttctcctcatacgcgcacattggggcgcgcgaaccagccgccaccggtggcaaacagttcgcgcccaacccgctggttggtac

SEQ ID NO: 17939 - RNA, 138 nt, unidentified
  source 1..138: mol_type = other RNA; note = Related to NZ_CP035951.1; note = Acidovorax sp.
gccaagcacttcgagcctgttgatcaggatcgagccgtggggcagccccacggtgttgtcttccaacgcgtccatcgcggcgcgcgaacctcccgccacccgtggcgtgcagttcgcacccaacccgcaggttggcac

SEQ ID NO: 17940 - RNA, 138 nt, unidentified
  source 1..138: mol_type = other RNA; note = Related to NZ_AFBG01000026.1; note = Acidovorax radicis
gccaagcatttcgagcctgttcatcaggttcgagccgtggggcagccccacggtgttgtcttccaaagcgtccatcgcggcgcacgaacgtcacgccacccgtggcgcgatgttcgcgcccaacccgccggttggcac

SEQ ID NO: 17941 - RNA, 135 nt, unidentified
  source 1..135: mol_type = other RNA; note = Related to JAHUWH010000023.1; note = Acidovorax sp.
gccaagcatctcgaactctcaccggttcgaaccgtggggtagccccacggtgtctcactgcaagcgcccattgtggcgcgcgaacctccaagccatcctggcaagcgtgttcgcgcccaacccgccggttggtgc

SEQ ID NO: 17942 - RNA, 133 nt, unidentified
  source 1..133: mol_type = other RNA; note = Related to AKJX01000004.1; note = Acidovorax sp.
gccaagcattctgaaccactgaaggttcgggccgtggggtagccccacggtgtatccgacaagcacgcttcgcggcgcgcgaaccacccgccacccgtggcgcccagttcgcgcccgacccgcaggttggtgc

SEQ ID NO: 17943 - RNA, 133 nt, unidentified
  source 1..133: mol_type = other RNA; note = Related to JACHLK010000020.1; note = Acidovorax soli
gccaagcattccgaccccttaccggttcgggccgtggggtagccccacggtgtatctggcaagcgcacatcgcggcgcgcgaacctcctgccatccgtggcaccaggttcgcgcccaacccgcaggttggcgc

SEQ ID NO: 17944 - RNA, 133 nt, unidentified
  source 1..133: mol_type = other RNA; note = Related to JAFKGX010000054.1; note = Comamonadaceae bacterium
gccaagcattccgagcctgtcagggttcgggccgtggggcagccccacggtattcctcgcaagcgcacatcggggcgcgcgaaccgcacgccacccgtggcgacccgttcgcgcacgacctgccggttggcgc

SEQ ID NO: 17945 - RNA, 158 nt, unidentified
  source 1..158: mol_type = other RNA; note = Related to JAGOEM010000124.1; note = Ottowia sp.
accaagcctttcgagtgttgattgggtctgcttcggcaggtacaggaaaagctcgggctgtggggcttccccacggtcaacctccagcgtgacattgcggcgcacgaacgccactcctgctcaggagccctgttcgtgcacaacccgcacgttggctg

SEQ ID NO: 17946 - RNA, 168 nt, unidentified
  source 1..168: mol_type = other RNA; note = Related to NZ_JADKYZ010000005.1; note = Diaphorobacter sp.
gccaagcgttgccgcattggctccacccgcgttcatgcaacgcatgtggtttcgtcaatacgggccgtggggcatccccatggttgctttcaaaatggacttcaccgggcgcgaacttcccgcggattcatctcgcaacctgttcgcgcaagacctgcaggttggcag

SEQ ID NO: 17947 - RNA, 138 nt, unidentified
  source 1..138: mol_type = other RNA; note = Related to RDZW01000120.1; note = Burkholderiales bacterium
gtcaagattgctgattcgtctgcaatcctggcgctccggggcatccccggggttattggataggtgtgcatttcggtgcatgagcccgacctgcgctttcagcgcagatcagctaatgcgagaccggttggttgaagc

SEQ ID NO: 17948 - RNA, 141 nt, unidentified
  source 1..141: mol_type = other RNA; note = Related to NZ_BCWR01000006.1; note = Hydrogenophaga taeniospiralis
ttcaagatctctcgaagacgctggtcgttttcgggctgtggggcatccccacggcgacgatgctttcctggacacacggcgcgcgatcccgacctgcgccgctggcgcaggacagatagcgccagacctgctggttgaagc

SEQ ID NO: 17949 - RNA, 140 nt, unidentified
  source 1..140: mol_type = other RNA; note = Related to PHCR01000005.1; note = Betaproteobacteria bacterium HGW-Betaproteobacteria-15
ttcaagatccctcgaagacgctggtcgttttcgggctgtggggtatccccacggcgacgatggtttcctggacacacgacgcgcgatccgcgctgcgccgctggcgcagaccagatagcgctggacctgctggttgaggc

SEQ ID NO: 17950 - RNA, 141 nt, unidentified
  source 1..141: mol_type = other RNA; note = Related to NZ_CP063400.1; note = Hydrogenophaga sp.
ttcaagaaccctcgaagacgctcgacgttttcgggctgtggggcatccccacggcgacacacgattccctggacacacgacgcgcgatccgcgctgcgccgctggcgcaggacagatcgcaccggaccggctggttggaac

SEQ ID NO: 17951 - RNA, 140 nt, unidentified
  source 1..140: mol_type = other RNA; note = Related to NZ_BCTF01000032.1; note = Hydrogenophaga flava
gccaagcgcaatcgaaagcctcttggttttcgggctgtggggcatccccatggcaacgtctgatggttggcacacacggcgcgcgatccgcgctgcgccgctggcgcaggacagatcgcacccgaccggctggttggcgc

SEQ ID NO: 17952 - RNA, 144 nt, unidentified
  source 1..144: mol_type = other RNA; note = Related to NZ_CP071796.1; note = Ottowia testudinis
ttcaagaaccatcgagaacgcgtttttgcgtttttcgggccgtggggcatccccacggcaagttatcttgtgtgcgcattccggcgcgcgatcggccttgcgctgccacgcaaacatgatcgcgcacgaccggctggttgaagc

SEQ ID NO: 17953 - RNA, 135 nt, unidentified
  source 1..135: mol_type = other RNA; note = Related to NZ_CP011514.1; note = Mitsuaria sp.
gccaagccttcggaagcgttcgcgcctccggccgcggggcatccccgcggcgctcttcttcgttagtcatccggcgccgataccgagccacgctgccgcgcggacctgtatcggtcgagaccggccagttggcgg

SEQ ID NO: 17954 - RNA, 134 nt, unidentified
  source 1..134: mol_type = other RNA; note = Related to NZ_BCYP01000018.1; note = Mitsuaria chitosanitabida
gccaagctttcggaagcgcttgcgcctccggccgcggggcatccccgcggcgctctcgttggacagccatccggcgccggttcggcaccgcgctcgcgcgcggagatgaacccgcgagaccggtgagttggcgg

SEQ ID NO: 17955 - RNA, 134 nt, unidentified
  source 1..134: mol_type = other RNA; note = Related to CP013729.1; note = Roseateles depolymerans
gccaagcctgtcggaggctctggcttccgggccgcggggcatccccgtggcatcgcattgagtgacgcattccggcgcgagatccgccttgcgcttcgcgcaacacagaactcgcaggaccggctcgttggcag

SEQ ID NO: 17956 - RNA, 134 nt, unidentified
  source 1..134: mol_type = other RNA; note = Related to JACHXO010000004.1; note = Roseateles terrae
gccaagcatgtcgaaggcttcggctttcgggccgcggggcatccccgtggcatttttcagagtgaggcattccggcgcgccttcggcaatgcgctgcgcgcatcggagaaatcgcaggaccggctcgttggtgg

SEQ ID NO: 17957 - RNA, 135 nt, unidentified
  source 1..135: mol_type = other RNA; note = Related to FOAV01000002.1; note = Roseateles sp.
gccaagcatgtcggaggctcacgcttccgggccccggggaatccccggggcatcgtccatagtgattcattccggcgcgagttccgacgtgcgctccgcgcattccagaacatcgccagaccggccggttggtgg

SEQ ID NO: 17958 - RNA, 136 nt, unidentified
  source 1..136: mol_type = other RNA; note = Related to JACORT010000001.1; note = Ramlibacter sp.
ttcaagcattcaccggtaccggaaggtcccgggccgtggggcatccccacggcatcccttcgaagctgccatcacgttgcggaatggccgttgcgcgctgcgcaagacgcatgccgcagcacccgctggttggggc

SEQ ID NO: 17959 - RNA, 136 nt, unidentified
  source 1..136: mol_type = other RNA; note = Related to RKMB01000020.1; note = Ramlibacter sp.
ttcaagcatcatcgagggtgaaagaccttcgggccgtggggcatccccacggcatctcttgaagttggcattacggcgcgtgatgcgcactgcgcgaaaacgcaggagtcatcacgcctgacccgctggttggagt

SEQ ID NO: 17960 - RNA, 136 nt, unidentified
  source 1..136: mol_type = other RNA; note = Related to JAHBZO010000019.1; note = Ramlibacter sp.
ttcaagcattaccgaggtttaaaagcctcgggctacggggtatccccatagcaatagttctagcaagcatttcggcgcgtgatgccaactgcgactgcgtcgcagcgcacatctcgcttgaccggctggttgaggg

SEQ ID NO: 17961 - RNA, 151 nt, unidentified
  source 1..151: mol_type = other RNA; note = Related to NZ_JABRWJ010000001.1; note = Aquabacterium terrae
cccaagtcttgccgaggctcaccgaccccgtgcggtggtttcgggccgcggggtttccccgcggcaggttccagcactcgatcttttcggcgcgtgaccggacctgcgctgacgcgcagacctggtcgcgcatcacctgctcagttgggaa

SEQ ID NO: 17962 - RNA, 147 nt, unidentified
  source 1..147: mol_type = other RNA; note = Related to NZ_CP045644.1; note = Variovorax paradoxus
ttcaagactcgacaaggtgatgcgattcgtcgtttgaccttgtgctgcggggaaaccccgcggtggatggatggctacccgttccggcgcgcaagcggatctgcgctaacgcgcagcccagctggcgcatcaccggcaggttgaagg

SEQ ID NO: 17963 - RNA, 135 nt, unidentified
  source 1..135: mol_type = other RNA; note = Related to NZ_CP046508.1; note = Variovorax sp.
gacaaggcgggcgattcgtcgctttccttgtgctgcggggcacccccgcggtcgatggatgggtacgcatttcggcgcgtgagcggaactgcgctgtcgcgcagcgcagctggcgcatcaccggctggttgaagg

SEQ ID NO: 17964 - RNA, 147 nt, unidentified
  source 1..147: mol_type = other RNA; note = Related to NZ_RXFT01000006.1; note = Variovorax guangxiensis
ttcaagactcgacaaggccctgcgatccgtcgcccggtcttgtgctgcggggtaaccccgtggcggatggatggcttcgcattccggcgcgcaagcggcgctgcgcatccgcgcagaccagctggcgcatcaccggctggttgaagg

SEQ ID NO: 17965 - RNA, 147 nt, unidentified
  source 1..147: mol_type = other RNA; note = Related to FOLP01000001.1; note = Variovorax sp.
ttcaagactcggcaaggcttcgcgatccgtcgttcggccttgtgctgcggggataccccgtggtggatggatggctacccatttcggcgcgcaagcgcgtctgcgctcacgcgcagcacagctggcgcatcaccggctggttgaagg

SEQ ID NO: 17966 - RNA, 147 nt, unidentified
  source 1..147: mol_type = other RNA; note = Related to FOWG01000009.1; note = Variovorax sp.
ttcaagacacgacgaggccctgcgatccgtcgccttgcctcgtgctgcggggtacccccgcggtggatggatggttgcccattccggcgcgcaagcgggactgcgctcacgcgcaggacagctggcgcttcaccggctggttgaagc

SEQ ID NO: 17967 - RNA, 147 nt, unidentified
  source 1..147: mol_type = other RNA; note = Related to FPBM01000001.1; note = Polaromonas sp.
tccaagtgttgcgagcggaatgcgattcgttgctgcccgtccgcaccatggggtacccccatggttgttttgtactctgcgatttcggcgcgtgagcggcctgcgcattctgcgcacccagctcacgcgggacctgctggttgggat

SEQ ID NO: 17968 - RNA, 147 nt, unidentified
  source 1..147: mol_type = other RNA; note = Related to FNJA01000002.1; note = Rhodoferax sp.
gccaagtgtcgtgagcccagggcaatacgttgttctgactcgcactgtggggtacccccacggttgttttattaccgagccatctcggtgcgtgcgccacacgcgcatgctgcgcggactgcccacgccggacctgctggttgacgc

SEQ ID NO: 17969 - RNA, 151 nt, unidentified
  source 1..151: mol_type = other RNA; note = Related to JACRAZ010000105.1; note = Burkholderiales bacterium
gccaagcgttcaccggttgccggccgatccgtcgaccgacaccgggctccggggtttccccggggcaggttcatcacccagtcctttcggcgcgtgaccggccgtgcgctgaccgcgcacacaaggtcacgcctcacccgcaggttggcgg

SEQ ID NO: 17970 - RNA, 142 nt, unidentified
  source 1..142: mol_type = other RNA; note = Related to SCTQ01000267.1; note = Aquabacterium sp.
gcgaggcccttgcggaaggcgattcgtcgcttgccgtgccgcggggcacccccgcggttcactgatcactcaggcacttcgtcgcgcgaccttcagtgctcgatcgagcacggctgctcgcgcctgaccggctcgctcgcag

SEQ ID NO: 17971 - RNA, 142 nt, unidentified
  source 1..142: mol_type = other RNA; note = Related to NZ_LMDI01000005.1; note = Rhizobacter sp.
cccaagcacatcgtggaccggcgcttcggaaccgggtctgccccgcggggtacccccgcggtggattgttggctggtacatcctgggcgtgaggcgacggcgcaatgcgcccacacctcacgcatcacccgcaggttgggcg

SEQ ID NO: 17972 - RNA, 145 nt, unidentified
  source 1..145: mol_type = other RNA; note = Related to PTEU01000001.1; note = Ideonella sp.
cgcaagtgtttcgcgagaccgttcttttcaagagcactcgcacagcggggttcccccgtctgttgaattgtgttgtggccaccgaggcgtgatcgacctggcgacccgtcgccaaccagatcacgcatcacctgcaggttgtgta

SEQ ID NO: 17973 - RNA, 142 nt, unidentified
  source 1..142: mol_type = other RNA; note = Related to DXIO01000116.1; note = Candidatus Aquabacterium excrementipullorum
tccaagtttccggcgatccagttcatgcaattggctcgcactctggggataccccagggttacccatcggcatcccgacgagaggcatgtgcgggtcggcgatcctcgccgctcagctcacgcatcacccgcaggttggatg

SEQ ID NO: 17974 - RNA, 127 nt, unidentified
  source 1..127: mol_type = other RNA; note = Related to NZ_JAJNKD010000019.1; note = Ideonella azotifigens
ctcgtgctggcggtggcgtcttcgcgccgcggggtacccccgcggttgatggtttgcctggtactttcggggcgtgagcggagtggctgtttgccaatcagctcacgcatcacccgcaggttgggtg

SEQ ID NO: 17975 - RNA, 146 nt, unidentified
  source 1..146: mol_type = other RNA; note = Related to JAEKKG010000289.1; note = Burkholderiales bacterium
cccaagtgtccttcggaacgttcatcgaacccattccgatccgcggggtacccccgtcggcaacgctcttgtcatgcccatccgaggcgatggccaccgcgtcgctgcgcgacgccacaccattcgcatcaccagcaggttgggcg

SEQ ID NO: 17976 - RNA, 132 nt, unidentified
  source 1..132: mol_type = other RNA; note = Related to JAJTWU010000010.1; note = Pelomonas sp.
ccgaggtcctggcaagccttcacgggtttgcactccggggtacccccgggggttgccgatctcgcgtccagcagggcatggagcgcggggcgctgtgcgcccgacaccccatgcatcacccgtcgctcgggc

SEQ ID NO: 17977 - RNA, 134 nt, unidentified
  source 1..134: mol_type = other RNA; note = Related to NZ_LMFP01000011.1; note = Pelomonas sp.
cccgaggtctttgccagccttcacgggcgggcactccggggcacccccgggggtcttgaatctctcgtccggcagggcgcgagcccggtggcgcaaagcgccaggcagctcacgcatcacccgtcgctcgggca

SEQ ID NO: 17978 - RNA, 131 nt, unidentified
  source 1..131: mol_type = other RNA; note = Related to JAJTWT010000006.1; note = Pelomonas sp.
ccgaggtcttcgcgagcctttgggcaagtactccggggcacccccgggggtcatggatgtctcgacccgcagggcgtgagaacgccgggcgcacagcgcccttcacctcacgcatcacccgtcgctcgggc

SEQ ID NO: 17979 - RNA, 133 nt, unidentified
  source 1..133: mol_type = other RNA; note = Related to JAACZV010000015.1; note = Comamonadaceae bacterium
ccgaggtctttgccagccctcacgggccagcactccggggcaaccccgggggtcttgaatctcgcgtccagcagggcgtgagcggtcccggcgcaaggcgccagccacctcacgcgccacccgtcgctcggtc

SEQ ID NO: 17980 - RNA, 134 nt, unidentified
  source 1..134: mol_type = other RNA; note = Related to JAEKLF010000057.1; note = Burkholderiales bacterium
ccgaggtctttgccagccttcacgggcgggcactccggggcaacccccgggggttctgagtctctcgtccagcagggcgtgagaacgcctggcgcaatgcgccaatcacctcacgcaccacccgtcgctcgggc

SEQ ID NO: 17981 - RNA, 150 nt, unidentified
  source 1..150: mol_type = other RNA; note = Related to QAJN01000008.1; note = Paucibacter sp.
cccaagttctccgtgaagtgcatgcacggctgtgtttgcgcctcacacccaggggcaccccctgggtcatgtttttgttgaagtcaatcggggcctgatcggcgtggcgctgtgcgccagtcggatcaggcaggacccgcaggttgggca

SEQ ID NO: 17982 - RNA, 138 nt, unidentified
  source 1..138: mol_type = other RNA; note = Related to LMHL01000001.1; note = Rhizobacter sp.
gccgagcagaaacgggttgcagtacggacccggctgtggggcacccccacggcatcgagtcgactttggcattcgcggtgcaagcccgacgtgcgctgacgcgcacgccagctgaccacgagaccggcaggtcggcgt

SEQ ID NO: 17983 - RNA, 138 nt, unidentified
  source 1..138: mol_type = other RNA; note = Related to FRCQ01000002.1; note = Rhizobacter sp.
gccgagcagacacgggtcgccgttcagggcccggctgtggggtacccccatggcatcgaatcgatcttggcatccgcggtgcaagagggtgtgcgctgacgcgcacgtcttcttggcacgggaccggcaggtcggcgt

SEQ ID NO: 17984 - RNA, 139 nt, unidentified
  source 1..139: mol_type = other RNA; note = Related to VBCX01000083.1; note = Betaproteobacteria bacterium
tccaagcacgacgcaagttcagttgttcggacttgcgctgtggggcacccccatggctttgattcgacgatggcatacgcggcgtgagccgcaatgcgcggtgcgcgtgattgctcacgcgagaccggcaggttggagt

SEQ ID NO: 17985 - RNA, 141 nt, unidentified
  source 1..141: mol_type = other RNA; note = Related to JACKEI010000001.1; note = Sandaracinaceae bacterium
accgagcgtgcacactctggcggagctcgtctctgcctctccggggttaccccggagacacgacctagtcgcccattgcgaggcgcgcccgtccggacacttcatgtccgcctgggcgggcccggcgggactcgtcgggga

SEQ ID NO: 17986 - RNA, 131 nt, unidentified
  source 1..131: mol_type = other RNA; note = Related to JACKEJ010000006.1; note = Sandaracinaceae bacterium
cgcaacgcggcagagcctggctctgcctctccggggttaccccggggacacgtatcgaccacccttcacgaggcacgtccgccccgacaccccatgtcgatctggacgcgccccttcggactcgtcgggga

SEQ ID NO: 17987 - RNA, 139 nt, unidentified
  source 1..139: mol_type = other RNA; note = Related to JACRCU010000218.1; note = Deltaproteobacteria bacterium
gccaagcagaccaccggcagccctgccgcggtctctctggggctaccccagggcaaattcatcggcctgcccggccaccgcaggacccgcagcgtcgctccgcacgcgtccggtcctgcacgacgagcgaggttggcgc

SEQ ID NO: 17988 - RNA, 137 nt, unidentified
  source 1..137: mol_type = other RNA; note = Related to JACKIB010000005.1; note = Planctomycetes bacterium
tgcgagactggtgtgcgcccatggcgcacaccgctccggggcttccccggggactcaaatctgactgacgcatctcgagcacgacagctcagcggcggacgccgctcccgagtcgcgccccacacgtaggtcgcggt

SEQ ID NO: 17989 - RNA, 135 nt, unidentified
  source 1..135: mol_type = other RNA; note = Related to MDLA01000158.1; note = Chromatiales bacterium (ex Bugula neritina AB1)
tcctggttcttccagcgtagttaactcctcgctgggctttggggctaccccaaggtaatgtattgcttccattacgtggccagaacggccctgcactgcgtgcagatctgttcttgcgatattatgagcaggatg

SEQ ID NO: 17990 - RNA, 133 nt, unidentified
  source 1..133: mol_type = other RNA; note = Related to JAHQWB010000596.1; note = Granulosicoccus sp.
tccaagctattcccgtaagctctgtgcttatcggactctggggataccccagggttgaatactacaggcatttcacggcaggaacgatattgcacttcgtgcaagcccgttcatgcgattcaagggttggatg

SEQ ID NO: 17991 - RNA, 133 nt, unidentified
  source 1..133: mol_type = other RNA; note = Related to MABD01000012.1; note = Gammaproteobacteria bacterium 45_16_T64
tccaagctataccgactaagctaaggtttgggcgggctttggggttaccccaaggttgagttttactggcgttacgttgcgaaaacggtgttgcacggtgtgcaagtccgtttacgcgaattagggttgggtg

SEQ ID NO: 17992 - RNA, 134 nt, unidentified
  source 1..134: mol_type = other RNA; note = Related to NZ_ML660090.1; note = Exilibacterium tricleocarpae
ctcaagcattacctggtggcttgtccttcagggctttggggtaaccccaaggcggtggtttgtcggcttaacgttgcaagtatggtattgcaccttcagtgcaaagctatacttgcgtggggcagggttgagtg

SEQ ID NO: 17993 - RNA, 152 nt, unidentified
  source 1..152: mol_type = other RNA; note = Related to NZ_CP035490.1; note = Hahella sp.
ttcaagcgagcgtgatccggaaccggcgcgaccgggcctgatccgttgctccggggctaccccggggttacatgttgactacgcatatcgccgtccataccgccctacgccaaggcgtagaacggtatcgaccacgggaggagggttggagc

SEQ ID NO: 17994 - RNA, 152 nt, unidentified
  source 1..152: mol_type = other RNA; note = Related to NC_007645.1; note = Hahella chejuensis
ttcaagcgaacgtgatccggaaccggcgcgaccgggccaggtccgttgctccggggctaccccggggttacatgttgactacgcatatcgccgtccataccgccctacgccaaggcgtagaacggtatcgaccacgggaggagggttggagc

SEQ ID NO: 17995 - RNA, 151 nt, unidentified
  source 1..151: mol_type = other RNA; note = Related to NZ_AQXX01000078.1; note = Hahella ganghwensis
ttcaagcgattccggaagcaatgagtcagtcatttgtcaccggaaactccggggttaccccggggttaaacgtcaacgacacatatcaccgccggtaaggccctgcgctatgcgcgcagatactttaccggcaacacgagttggttgaagt

SEQ ID NO: 17996 - RNA, 150 nt, unidentified
  source 1..150: mol_type = other RNA; note = Related to MRYI01000026.1; note = Hahella sp.
tccaagcgaacctgacaggctaaggtacgacctctgccagtcggtacttcggggtaaccccgaggctatgcgttaaccattcatttcaacgccggtaaggcactgcgctataagcgcagccggttaccggctacttcagcgggttggagt

SEQ ID NO: 17997 - RNA, 127 nt, unidentified
  source 1..127: mol_type = other RNA; note = Related to JABLXQ010000049.1; note = Gammaproteobacteria bacterium
cctgagcctgtgttgtccccgtacaacacgctttggggttaccccaaggtccatcctgatccaccgttgcatcgtatgaacttcgctgcgctgcgcgcagtgcagttcacacgagagtagtcgtctc

SEQ ID NO: 17998 - RNA, 140 nt, unidentified
  source 1..140: mol_type = other RNA; note = Related to VISH01000001.1; note = Alteromonadaceae bacterium 2753L.S.0a.02
atcaggacatagcccataaaacttgttttacagggcgctttgaggttacctcaaggttatcgtatgcagttagacctatcagggtgtgtacggcggtgcgcggtgcgcacggaagtacacacagaaccagcggctggtgt

SEQ ID NO: 17999 - RNA, 159 nt, unidentified
  source 1..159: mol_type = other RNA; note = Related to RCHN01000046.1; note = Ketobacter sp.
atcaggacttgggaacagagcctcaacctggacacgttcagatcgagctttgctccgctccggggctaccccggggtttttcaggatcaccccatgacattgccaggatgtccggtgcgctccacgcacgggactcctgacggtaccggcggctgatac

SEQ ID NO: 18000 - RNA, 135 nt, unidentified
  source 1..135: mol_type = other RNA; note = Related to JABJPU010000111.1; note = Methylococcales bacterium
ttcaaggttttgggatgcatcgtcaacccaactttggggttaccccaagggtgtagtaaattgaaacaatccatgccgtgagcaacgtggcattgtcatgccaatatgctcacgtatgacaagttaagttgaagg

SEQ ID NO: 18001 - RNA, 148 nt, unidentified
  source 1..148: mol_type = other RNA; note = Related to CP065008.1; note = Alphaproteobacteria bacterium
tgcgagatgttcccaatcaatagcctgactatgacgggaactctgcggggcatccccgcggattggatcaaaactggacatttcacgcctgtacgccaagtgcgctgacacgcactgcgcgtacaagcacgacgagacgggtcgcagg

SEQ ID NO: 18002 - RNA, 147 nt, unidentified
  source 1..147: mol_type = other RNA; note = Related to JAGRIJ010000030.1; note = Alphaproteobacteria bacterium
cgcgagaatgttcctgagcgttagcatgactatatcagggactctgcggggcatccccgcggattgtttttaacgcaaccatatcgtcaccattacttcgttgcgctccgcgcaaacatgtaatggcaaaaccggacaggtcgcccg

SEQ ID NO: 18003 - RNA, 144 nt, unidentified
  source 1..144: mol_type = other RNA; note = Related to QFQP01000062.1; note = Archangium gephyra
gtcaggccactcgatgaagtcacttcggtgacgacgtcagctccggggttgccccggggtgtggtcgtacgcaacacaggcaggagcaggtgcgcggtccactctcgtggacggggcaccatgcagcacaggcgtcgctgacgc

SEQ ID NO: 18004 - RNA, 145 nt, unidentified
  source 1..145: mol_type = other RNA; note = Related to JAACJQ010000409.1; note = Archangiaceae bacterium
agcaggatttcgatgtgcctcgcagtcctggagtcacgtctcttcggggcatccccgagggtgtggagcaattcaccgtgtcgtcgcgacgtcttgcgcggcactgcgtgccggagcgacatcgcagagctggtcaggctgttct

SEQ ID NO: 18005 - RNA, 176 nt, unidentified
  source 1..176: mol_type = other RNA; note = Related to JAEUIQ010000011.1; note = Planctomycetaceae bacterium
tccaagctgattgaatcgttggtagttttacctctgggtgtttgcgaaagcgaattcccatgcgatttgatctcggcggggttaccccgtcgttgactcgataggctggcatttcaggctgtggtagagtgcgccctcgcgcacgattccacagcgcaaactggtttggttgggcg

SEQ ID NO: 18006 - RNA, 137 nt, unidentified
  source 1..137: mol_type = other RNA; note = Related to JADKJO010000032.1; note = Propionivibrio sp.
tccaggcgggttcgggttgcaagcagcccaaccgctccagggttaccctggggacttcttgatggctaatacttcgttgcctgagcgccgcacgcctgcggcgtgttcagctcaggctccacacgacaggctggaga

SEQ ID NO: 18007 - RNA, 139 nt, unidentified
  source 1..139: mol_type = other RNA; note = Related to NZ_AUCH01000007.1; note = Azovibrio restrictus
tccaggcgtaagccgtcctcctcggagtccggcggctctggggttaccccagggatgttctggtagtccggtatttccctgcctgagcggcccacgcctgcggcgtgatctgctcaggcaccacacgacaggctggagg

SEQ ID NO: 18008 - RNA, 140 nt, unidentified
  source 1..140: mol_type = other RNA; note = Related to NZ_CP075192.1; note = Ferribacterium limneticum
tccaggtgggtatcgggttgcattcaggcccggccactccggggttaccccggggatttttcggtagtttgcttattcattgcttgagcctcccacgcctgcggcgtgagcagctcaagcgccacacgacaggctggaga

SEQ ID NO: 18009 - RNA, 140 nt, unidentified
  source 1..140: mol_type = other RNA; note = Related to JAGTRU010000007.1; note = Proteobacteria bacterium
tccaggtgggttacgggttgtcgtcaaacccggccactccggggttaccccggggatttttcggtagttcggtttttccttgcctgagcgtcacacgcctgcggcgtgagcggctcaggcaccacacgacaggctggaga

SEQ ID NO: 18010 - RNA, 137 nt, unidentified
  source 1..137: mol_type = other RNA; note = Related to WBUO01000290.1; note = Dechloromonas sp.
tccaggcgggttcggattgtctgcaatccggccacgccggggctaccccggcggtttttcgcagttggacttttcatcgcctgaacctcacacgccgctggcgtgacctgttcaggcaggacacgacaggctggaaa

SEQ ID NO: 18011 - RNA, 130 nt, unidentified
  source 1..130: mol_type = other RNA; note = Related to JAGRFZ010000003.1; note = Rhodocyclaceae bacterium
gccaggcgggccggctcggatcggccgctccggggctaccccggggactcactcgaccttcccattgacgcgcctgaacgcttcacgccgctggcgtgcccggttcaggctccacacgacaggctggcga

SEQ ID NO: 18012 - RNA, 130 nt, unidentified
  source 1..130: mol_type = other RNA; note = Related to JAGRFY010000153.1; note = Rhodocyclaceae bacterium
gccaggcgggccgacgccgatcggccgctccggggttaccccggggactccctcgaccttcccattgacgcgcctgaacgcctcacgccaccggcgtgcccggttcaggctccacacgacaggctggcga

SEQ ID NO: 18013 - RNA, 144 nt, unidentified
  source 1..144: mol_type = other RNA; note = Related to NZ_KB892867.1; note = Uliginosibacterium gangwonense
cccaagcacaggctgatgcctgccttgcagacattggctcctccggggttaccccggggcgatacttgagctggcatttccgtgcatgagcccctctgcgcctgcggcgcagccaagcgcatgccacacacgacaggttgggcg

SEQ ID NO: 18014 - RNA, 141 nt, unidentified
  source 1..141: mol_type = other RNA; note = Related to JAEUNN010000841.1; note = Rhodocyclaceae bacterium
ttccagcgcgagtcggaggcacaagtgccttccggccacttcggggctaccccggggatgagtgatgttccggcattgcgtggcatgagccccgcggcgctccgcgccgggcagctcatgcaggacacggcaggtggaagg

SEQ ID NO: 18015 - RNA, 127 nt, unidentified
  source 1..127: mol_type = other RNA; note = Related to JAHCAA010000009.1; note = Rhodocyclaceae bacterium
ggccaggcttggccggtccggccactccggggctaccccggggatgattgtatttccggcatttcgtggcatgagcgtgacagcgcgctgcgccgggccgctcatgcaggacacggcaggtggaagc

SEQ ID NO: 18016 - RNA, 142 nt, unidentified
  source 1..142: mol_type = other RNA; note = Related to JADJSA010000006.1; note = Sterolibacteriaceae bacterium
tccaagcgcagcggcagggagtcgagaaactcctccgcgctcttgggttacccaagggtccagcatttccggcaaggcgcggcatgagcgccgctgcgcctgcgacgcaggactgctcatgcacgacacgacaggttggagc

SEQ ID NO: 18017 - RNA, 143 nt, unidentified
  source 1..143: mol_type = other RNA; note = Related to JADJHQ010000003.1; note = Sterolibacteriaceae bacterium
tccaagcacaacggtcagaggttcgagcaacccctccgcgctcttgggctacccaagggtcgagcacttccagcatcacgcggcatgagcggcactgcgcctgcggcgcagggttgctcacgcacgacacgacgggttggatt

SEQ ID NO: 18018 - RNA, 144 nt, unidentified
  source 1..144: mol_type = other RNA; note = Related to NSJF01000001.1; note = Vandammella animalimorsus
tgcaggtcttcactggcatcgcccatggcgaccgcatgaccatggggcacccccatggatgcagacacacttggaaatcgcagcggctgtgccccacataccccagggtatgcaccgcacagccaggacacgacgggctgaagc

SEQ ID NO: 18019 - RNA, 137 nt, unidentified
  source 1..137: mol_type = other RNA; note = Related to JAKGTI010000001.1; note = Maritalea sp.
ctctggttatgcctatacgacagtgtaaggcatggagcggggcatccccgtttataagtgttactgagacaaacacggcgctaccggcactgggcttcacccagatttggtagcgcaggacaaagaaaagcagaggc

SEQ ID NO: 18020 - RNA, 136 nt, unidentified
  source 1..136: mol_type = other RNA; note = Related to FNUZ01000001.1; note = Thalassococcus halodurans
ttttggatacccttcgcatctacgcaaagggacgggcggggcatccccgtctattagactgaccttagcaaacacggcacaaccgcatctgggcgttgcccagtatgggtggtgcaaaaccgagacaggcaaaaac

SEQ ID NO: 18021 - RNA, 137 nt, unidentified
  source 1..137: mol_type = other RNA; note = Related to JAESRD010000022.1; note = Rhodobacteraceae bacterium
ctttggaatgctctgtacagcaatgtagagagcggggcggggtatccccgtctgagacgatgagctacgcaaacacggcaataacgacgctgggcgctgcccagaatagttgttgcaaggcgaaggtgagcaaagat

SEQ ID NO: 18022 - RNA, 137 nt, unidentified
  source 1..137: mol_type = other RNA; note = Related to VICH01000004.1; note = Aliiroseovarius halocynthiae
tcaaggaccgcttgttttctcaatgaatcaagcaggttggggcatccccaactttacctatgacctctgcatacacggcatcaccgacactgggcttcgcccagcacaggtgacgcaagaccgagattggcttgagt

SEQ ID NO: 18023 - RNA, 137 nt, unidentified
  source 1..137: mol_type = other RNA; note = Related to JABDJG010000107.1; note = Hyphomicrobiales bacterium
ctttggatggctctttgcagcaatgtaaagagtggggcggggtatccccgcctgcgacgaccaccaagccaaacacggcgctaccgacgctgggctacgcccagtaccggtaacgcgagaccgaggaaagctgagac

SEQ ID NO: 18024 - RNA, 137 nt, unidentified
  source 1..137: mol_type = other RNA; note = Related to JAGRLY010000042.1; note = Alphaproteobacteria bacterium
ctttggataacgctgtgcagaaatgtgcagggttgggcggggcatccccgcctgcgacgacgacctgagcatacaaggcgttaccgccgctgggcttcacccaggtggggtaacgcgaaacgaagatgagcaaagac

SEQ ID NO: 18025 - RNA, 140 nt, unidentified
  source 1..140: mol_type = other RNA; note = Related to NZ_JAEHHL010000001.1; note = Proposed Thermohalobaculum xanthum
catgggttggccggggtcgcgagacccgagggcccgggcggggcatccccgcccgacgaccaagacctggcaagacgtggcatgcccgtccgtgggcgcaggcccacgcaggggcatgcgggaccgagtgaggccatgac

SEQ ID NO: 18026 - RNA, 135 nt, unidentified
  source 1..135: mol_type = other RNA; note = Related to NZ_FOIZ01000001.1; note = Cognatiyoonia koreensis
ctctggaatgatgcgcctgcatggcacatcggggcggggtatccccgtctgagagaacgacctgcacatcacatggcctgaacgtctctgggtttcacccagtgccgttccagcatgacaagaaggagcagagac

SEQ ID NO: 18027 - RNA, 134 nt, unidentified
  source 1..134: mol_type = other RNA; note = Related to NZ_BLJE01000002.1; note = Litoreibacter roseus
ctttggattggtgcaccttttggtgagcctggggcggggtatccccgtctgatgacattgctccgacacactgtggatatccgccactgagtttcactcaggacgggatatccaaagcacagaatagcagaggt

SEQ ID NO: 18028 - RNA, 128 nt, unidentified
  source 1..128: mol_type = other RNA; note = Related to JACXGQ010000004.1; note = Yoonia sp.
ctctggctggtgtctttgataccaagggcggggtatccccgcctgaccaaacgacctttgcatacacggcatcaccgtgactgggcgttacccagtcctggtgacgcgcgaccaagaaaggcagagat

SEQ ID NO: 18029 - RNA, 127 nt, unidentified
  source 1..127: mol_type = other RNA; note = Related to NZ_PKFN01000009.1; note = Yoonia maritima
ctctggttggcgcttcacggcaccggggcggggcatccccgcctaacttaccacctttgcatacacggcatcaccgttactgggcgcagcccagcgcgggtgatgcgcgaccaagaaaggcagagat

SEQ ID NO: 18030 - RNA, 130 nt, unidentified
  source 1..130: mol_type = other RNA; note = Related to NZ_JADCKQ010000007.1; note = Paenihalocynthiibacter styelae
ttccggaacgtgcccgttaagggtgcagggcggggtatccccgtctgattttaatacgatgcaattcggggcgcgccggcgcgtgggctttcacccacctcccggcacgcagaaccaggttggcggaaat

SEQ ID NO: 18031 - RNA, 129 nt, unidentified
  source 1..129: mol_type = other RNA; note = Related to FWXB01000002.1; note = Roseovarius aestuarii
tccaagccgccggagaaattcggccggatggggcttccccatcttactaccgttacgctggacattcggcgcatgaccgccactgggcttcgcccaggaccggtcatgcaggacacgacaggttggggt

SEQ ID NO: 18032 - RNA, 130 nt, unidentified
  source 1..130: mol_type = other RNA; note = Related to DQCI01000287.1; note = Rhodobacteraceae bacterium
cccaagacgccggagcaattcggccgggcggggtttccccgccctcgcatccgtcagactggacattcggcgcatgaccgccgctgggcttcacccaggaccggtcatgcaggacacgacaagttggggc

SEQ ID NO: 18033 - RNA, 127 nt, unidentified
  source 1..127: mol_type = other RNA; note = Related to NZ_NSBT01000024.1; note = Actibacterium ureilyticum
ctcaagcggccgcgcaaccggccgggcggggcttccccgcccaaatctcgttacactggacattcggcgcatgaccgggactgggctgcacccagtgcgggtcatgcaggacacgacaggttgaggc

SEQ ID NO: 18034 - RNA, 128 nt, unidentified
  source 1..128: mol_type = other RNA; note = Related to NZ_BMYJ01000004.1; note = Gemmobacter tilapiae
ttcaaggggtggagcgatccacagggccggggcttccccggccagacgatcccagttggaacattcgacgcgtggaactccctgggccttacccagagctttccacgcaggacaggaaaggttgaacc

SEQ ID NO: 18035 - RNA, 128 nt, unidentified
  source 1..128: mol_type = other RNA; note = Related to NKIU01000001.1; note = Pseudorhodobacter sp.
gtcaagacgccgggcatcccggctgggcggggcttccccgcccatctttcgcacgttgtgacattcgacgcatggccttgcctgaacatcattcagatccggccatgcaggacaggtgaggttgaccc

SEQ ID NO: 18036 - RNA, 127 nt, unidentified
  source 1..127: mol_type = other RNA; note = Related to JADJTJ010000002.1; note = Rhodobacter sp.
gccaagatgccggatctccggccgggcggggcttccccgtcccattcgacgcaagttgcacattcgacgcatgaccgggcctgggcttcacccagatcaggtcatgcaggactggtgaggttggccc

SEQ ID NO: 18037 - RNA, 126 nt, unidentified
  source 1..126: mol_type = other RNA; note = Related to NZ_WCHR01000012.1; note = Gemmobacter serpentinus
gccaagcgccgggcaaccggaggggtggggcttccccacccgaaaaacgcaacgccagacattcgacgcaaggacggcgccgggctctgcccgggtcagtccttgcaggaccagagaggttggacc

SEQ ID NO: 18038 - RNA, 126 nt, unidentified
  source 1..126: mol_type = other RNA; note = Related to NZ_VKKX01000051.1; note = Gemmobacter caeruleus
accaagcgccgggcaaccggaggggcggggcttccccgcccgcatcgcatcacgcctgacattcgacgcatggccgtcgccgggcgccacccgggccgggccatgcaggaccagagaggttggcgc

SEQ ID NO: 18039 - RNA, 126 nt, unidentified
  source 1..126: mol_type = other RNA; note = Related to CP059262.1; note = Exiguobacterium profundum
gtcaagatgccgggaaaccggtcgggcgggcttcccgacccgcagcacgcaaggccgccgattcgacgcaggaccgtccccgggcttcacccggaccgggtcctgcaggaccagagaggttgaccc

SEQ ID NO: 18040 - RNA, 131 nt, unidentified
  source 1..131: mol_type = other RNA; note = Related to NZ_WQIE01000002.1; note = Ruegeria sp.
ctcaagaccgtgggcaaccacattctgcggggtttccccgtggcttacgacctgactgcatacattcggcgcatgacccaggcttgccgttggcaaggacaggtcatgccgaacagagatatggttgaggg

SEQ ID NO: 18041 - RNA, 133 nt, unidentified
  source 1..133: mol_type = other RNA; note = Related to NZ_RYZK01000009.1; note = Shimia sediminis
ttcaagacttttgggttctacccaaatttggcggggcatccccgtcgcaaacaacgttaccttggccattcggcgcaaaaccctgactgggcttcacccagcgcaggttgtgccagacatgtgaggttgaaag

SEQ ID NO: 18042 - RNA, 134 nt, unidentified
  source 1..134: mol_type = other RNA; note = Related to NZ_JABUFE010000011.1; note = Sulfitobacter algicola
cttaagatatcggggccttgtcccgaccgggtggggcttccccatccgaaccaaccttacttgcagcattcggcgcaaaggcttgattgggcgctgcccaaggcagcctttgccagtccagatcaggttaagcg

SEQ ID NO: 18043 - RNA, 143 nt, unidentified
  source 1..143: mol_type = other RNA; note = Related to NZ_JAKJIC010000019.1; note = Pleomorphomonas sp.
gtcaagatactcccgtcatcgcgtgcgatgggggagagctgcggggttaccccgcggcagccttgttacctggacacttccgccgcatgaacagcactgggctctgcccaggaccgctcatgcaggacatgtagggttgatcg

SEQ ID NO: 18044 - RNA, 139 nt, unidentified
  source 1..139: mol_type = other RNA; note = Related to JAIENJ010000270.1; note = Parvularculaceae bacterium
ttcaagcattctcgcaacgcgcgcgttgtcgagatcttcggggcaaccccgggggcaagttattatctgcacagcacgctgcgtgacccgccgaaggctttgcctacccaaggtcacgccaaaccagacgagttgaagc

SEQ ID NO: 18045 - RNA, 140 nt, unidentified
  source 1..140: mol_type = other RNA; note = Related to JAEUMS010000015.1; note = Hyphomonadaceae bacterium
ttcaagcaatcccggaaacgttcgcgttgacgggatcttcggggataccccgaggacttcttgttttccgcacagagcgctgcgtgacgcgcggcaggctttgcctgcgttacgtcacgccaaaccagttgagttgaagt

SEQ ID NO: 18046 - RNA, 131 nt, unidentified
  source 1..131: mol_type = other RNA; note = Related to JAEUMQ010000004.1; note = Hyphomonadaceae bacterium
ttcaagcttcccggcgaaagcttgggatctctggggctaccccaggggctcatcgaactcggaccatacgttgcgtgatccccggtaggctgtgcctacgttcgatcacgccagacaagacgcgttggagc

SEQ ID NO: 18047 - RNA, 137 nt, unidentified
  source 1..137: mol_type = other RNA; note = Related to NZ_LMUJ01000042.1; note = Acidisphaera sp.
tccaagcaatccctgacaccgaatcagggatcttcggggcaaccccggggttagtcgcgtttccaaggcagaacgttgcatggacgtgggtaggcttccgcctacggtcggccatgccggacgggttgggttggaag

SEQ ID NO: 18048 - RNA, 135 nt, unidentified
  source 1..135: mol_type = other RNA; note = Related to JADLHI010000158.1; note = Hyphomonadaceae bacterium
ctcaagcactccggtgcggctagcatcggacctccggggttaccccggggaggcattcacacctgagcatcacgcagcacggtacgcggtgggctctacccacgatataccgcgcataacaagaggggttggggc

SEQ ID NO: 18049 - RNA, 146 nt, unidentified
  source 1..146: mol_type = other RNA; note = Related to JADFVY010000399.1; note = Proteobacteria bacterium
ttcaagcaagtcctggcgatgcatcgcaagacggccgggactctccggggttaccccgggggacgaacgttactctgccattgccgtgcatgacccccttcaggcttcgcctgagacaggtcatgcgtgacgagacgggttgaagg

SEQ ID NO: 18050 - RNA, 147 nt, unidentified
  source 1..147: mol_type = other RNA; note = Related to JAEUME010000009.1; note = Hyphomicrobium sp.
ttcaagacaggcccggtcggtcacttcggtgccgtcgggtctctttggggttaccccaaggatatttcactattgtgctcagcccgcaacgcgatgccgggtaggtccgccctacgttacatcgcgtccgacacgttgggttgaagt

SEQ ID NO: 18051 - RNA, 147 nt, unidentified
  source 1..147: mol_type = other RNA; note = Related to JACMJQ010000424.1; note = Chitinophagales bacterium
ctcaagcaatcttcatgatgcgtttctgacgctattggagatctctggtgataccccaggggagactttttactcaggcaactcacggcatgatgcgcggtaggcctttgcctacatgtcatcaagcttcatacgacgggttgaggc

SEQ ID NO: 18052 - RNA, 145 nt, unidentified
  source 1..145: mol_type = other RNA; note = Related to JABFRX010000116.1; note = Alphaproteobacteria bacterium
ttcaagacttctccatgcggcttcggccggagggagatctctggggttaccccaggggacagaatggacgccagtaagacgcggcataggccgcgctgggcacgtcgcccagaatagcctacgcatcacgacgacaggttgaagc

SEQ ID NO: 18053 - RNA, 145 nt, unidentified
  source 1..145: mol_type = other RNA; note = Related to JAIOQG010000119.1; note = Alphaproteobacteria bacterium
ttcaagactccctgacgctgcacttcggttcagccagggaactccggggttaccccggggaacattcacaacgccagaaagacgtcgcataaccctcgctgggctgcacccagggccggttatgcctcacatgatgggttgaagt

SEQ ID NO: 18054 - RNA, 144 nt, unidentified
  source 1..144: mol_type = other RNA; note = Related to JAEUML010000192.1; note = Alphaproteobacteria bacterium
ttcaagacttctccgattgagcctcggttcggacggagatctctggggctaccccaggggaaatctcatacgcagtgaagacacggcgaaacgcacggtgggctacacccacataccgttttgcatgacgcgacgggttgaagc

SEQ ID NO: 18055 - RNA, 138 nt, unidentified
  source 1..138: mol_type = other RNA; note = Related to JADMJM010000043.1; note = Hyphomonadaceae bacterium
ttcaagaatgtcggtgcatttcgatgcgcggacgcttcggggttaccccgaaggagaactgtagccaacacaatacgttgcacgatgcgcggcaggcttcgcctgcaacccatcgagcctctctcgtttggttgaagc

SEQ ID NO: 18056 - RNA, 135 nt, unidentified
  source 1..135: mol_type = other RNA; note = Related to JAFECD010000003.1; note = Proteobacteria bacterium
gccaagcagtcctgggcaaccgggactctctggggctaccccaggggcattgatgacctcacgcagaacgcagcgaagagttccggtccgctccgccggacctgggctcctcgccagacacggtcgggttggcgc

SEQ ID NO: 18057 - RNA, 133 nt, unidentified
  source 1..133: mol_type = other RNA; note = Related to JABFRT010000004.1; note = Hyphomicrobium sp.
gctaagaactcctgggaaaccgggactctctggggttaccccaggggacaatatcaccacacgcacgacgcagcgtgggcctcgggtaggcagaacctaccggctgcccacgcaagacacggtaggttggcgc

SEQ ID NO: 18058 - RNA, 147 nt, unidentified
  source 1..147: mol_type = other RNA; note = Related to JAEUMD010000019.1; note = Hyphomicrobiaceae bacterium
ctcaagccgagaacgatgcttcatgccttggagcgtcgtgcctccggggctaccccgggggcgtgaattctaccccagcattcggcggcgtgatgcccggacgcctcgcggcgtcgaagcatcacgcaagacgtgattggttggggc

SEQ ID NO: 18059 - RNA, 145 nt, unidentified
  source 1..145: mol_type = other RNA; note = Related to JADKAD010000001.1; note = Deltaproteobacteria bacterium
cccgagctggtccacgcgacctccgtggggcaaccccacggcatcgtacttgcctcgtcactcggggggagacggaccgccgggatcgctcccggcgcgcgcctgtcggcgcttcacgtctcccagcacggagattcgtcgggcg

SEQ ID NO: 18060 - RNA, 138 nt, unidentified
  source 1..138: mol_type = other RNA; note = Related to JACMJN010001335.1; note = Deltaproteobacteria bacterium
accgaagcctaggcgtttcgacgccgcttccggggttaccccggggagaacctctcgacccgatcatcacggagcatgaccccgctccgcctgcgccctgcgcaggactggtcatgccgtagcggagcacgtcggtcg

SEQ ID NO: 18061 - RNA, 134 nt, unidentified
  source 1..134: mol_type = other RNA; note = Related to NZ_NGFO01000034.1; note = Gordonia lacunae
ggtgagaggggatcgtcgcgatccgtctcaggggtaacccctgggtgcacttcacagttggttcctgcgtccgacgccggcgcgcacgcttcacgtgccacccggcgccgttgcaccacagctctggtcaccac

SEQ ID NO: 18062 - RNA, 131 nt, unidentified
  source 1..131: mol_type = other RNA; note = Related to NZ_CP095552.1; note = Gordonia hongkongensis
ggtgagagtggatcgtcgcgatccgtctcaggggtaacccctgggtgcacttcacagctggtccctgcgtccgacgccggcgcgcacgctgcacgtgccacacggcgccgctgcacagttctggtcacccc

SEQ ID NO: 18063 - RNA, 134 nt, unidentified
  source 1..134: mol_type = other RNA; note = Related to NZ_JAKOIW010000003.1; note = Gordonia sp.
ggtgagaggggatcgtttcgatccgtctcaggggtaacccctgggtgcagtccacagttggttcctgcgtccgacgccggcccgcacgctgcacgtgctccacggcgccgcggcaccacggttctggtcaccac

SEQ ID NO: 18064 - RNA, 134 nt, unidentified
  source 1..134: mol_type = other RNA; note = Related to RKME01000013.1; note = Gordonia sp.
ggtgagagtggatcgtttcgatccgtctcaggggtaacccctgggtgcagttcacagttggttcctgcgtccgacgccggcgcgcacgctgcacgtgccacccggcgccgcgacaccaccgttctggtcgccac

SEQ ID NO: 18065 - RNA, 134 nt, unidentified
  source 1..134: mol_type = other RNA; note = Related to NZ_SLVY01000022.1; note = Rhodococcus sp.
ggtgagagcggatcgtttcggtccgtctcaggggaaacccctgggtacagttcacagttggttcctgcgtccgacgccgcaccgcacgctgcgcgtgccgaacggcgccgcgaccacgaggttcaggtcacctc

SEQ ID NO: 18066 - RNA, 134 nt, unidentified
  source 1..134: mol_type = other RNA; note = Related to NZ_FTNT01000002.1; note = Williamsia sterculiae
ggtgagagtggatcgtcacgatccgtctcaggggtaacccctgggtgcacctcacagttggtccctgcgtccgacgccggccggcacgctgcgcgtgcaccacggcgccgcgagaacgagttctgggtcaccgc

SEQ ID NO: 18067 - RNA, 134 nt, unidentified
  source 1..134: mol_type = other RNA; note = Related to JAADZU010000055.1; note = Gordonia desulfuricans
ggtgagaggggatcggttcgatccgtctcaggggaaacccctgggtacatgtcacagttggttcctgcgtccggcgccacacggcacgctccgcgtgcgacccggcgccgcggcactgcgttctgggtcactgc

SEQ ID NO: 18068 - RNA, 131 nt, unidentified
  source 1..131: mol_type = other RNA; note = Related to CP003119.1; note = Gordonia polyisoprenivorans
ggtgagaggggatcggttcgatccgtctcaggggtaacccctgggtacagttcacagttgggccctgcgtccgacgccgtgcagcacgctgcacgtgcaggccggcgccgcatcaaggttctggtcaccac

SEQ ID NO: 18069 - RNA, 132 nt, unidentified
  source 1..132: mol_type = other RNA; note = Related to BAFC01000046.1; note = Gordonia sputi
ggtgagagtggatcgagagatccgtctcaggggcaacccctgggtacacatcacagttggttcctgcgtccgacgccgctccgcacgctgcgcgtgccagccggcgacgagtactcggctcgtggtcacccc

SEQ ID NO: 18070 - RNA, 129 nt, unidentified
  source 1..129: mol_type = other RNA; note = Related to NZ_BANR01000005.1; note = Gordonia aichiensis
ggtgagagtggatcgagagatccgtcccaggggcaacccctgggtacatgtgacagttggttcctgcgtccgacgccggtccgcacgctgcgcgtgccgggcggcgacgagcactcggctcgtggtcac

SEQ ID NO: 18071 - RNA, 132 nt, unidentified
  source 1..132: mol_type = other RNA; note = Related to NZ_CP085974.1; note = Gordonia otitidis
ggtgagtgtggatcgagagatccgtctcaggggcaacccctgggtacatgtcacagttggttcctgcgtccgacgccgctccgcacgctgcgcgtgccagacggcgacgagtgttcggctcgtggtcgcccc

SEQ ID NO: 18072 - RNA, 134 nt, unidentified
  source 1..134: mol_type = other RNA; note = Related to NZ_BANX01000005.1; note = Gordonia soli
ggtgagggtggatcggtccgatccgtctcaggggtaacccctgggttcatcacacagttggtccctgcgtccgacgccacgccgcacgctgcgcgtgctacccggcgccgcgatcacgcgttcgaggtcaccgc

SEQ ID NO: 18073 - RNA, 134 nt, unidentified
  source 1..134: mol_type = other RNA; note = Related to NZ_AGFF01000003.1; note = Dietzia alimentaria
ggtgagagtggatcgatccgatccgtctcaggggcaacccctgggtacacatcacagcaagttcctgcgtccggtgccgcacggcacgctccgcgtgcgcaacggcaccgccaagacgagttccaggtcacctc

SEQ ID NO: 18074 - RNA, 134 nt, unidentified
  source 1..134: mol_type = other RNA; note = Related to NZ_CP046569.1; note = Dietzia sp.
ggtgagagtggatcgatccgatccgtctcaggggcaacccctgggtacacatcacagcaagttcctgcgtccggtgccgcacggcacgctccgcgtgcgcaacggcaccgccaagacgagctccaggtcacctc

SEQ ID NO: 18075 - RNA, 134 nt, unidentified
  source 1..134: mol_type = other RNA; note = Related to NZ_CP046567.1; note = Dietzia sp.
ggtgagggtggatcgatccgatccgtctcaggggcaacccctgggtgcacatcacagcgagacactgcgtccggcgccgtgcggcacgctccgcgtgcgcgacggcaccgcagagacgaacgtcgggtcacctc

SEQ ID NO: 18076 - RNA, 134 nt, unidentified
  source 1..134: mol_type = other RNA; note = Related to NZ_NTGA01000019.1; note = Dietzia natronolimnaea
ggtgagagtggatcgatccgatccgtctcaggggcaacccctgggtgcacatcacagcgagaccctgcgtctggtgtcgcgcggcacgctccgcgtgcaggacgacaccaccagaacgagcgtcaggtcgcctc

SEQ ID NO: 18077 - RNA, 134 nt, unidentified
  source 1..134: mol_type = other RNA; note = Related to DWWP01000013.1; note = Candidatus Dietzia intestinipullorum
ggcgagagtggatcgatcctatccgtcccaggggcaacccctgggtgcacatcacagcgagttcctgcgtccggagccgccgggcacgctccgcgtgcgacccggcaccgccgagacgagttcccggtcgcctc

SEQ ID NO: 18078 - RNA, 134 nt, unidentified
  source 1..134: mol_type = other RNA; note = Related to NZ_JAIFXZ010000017.1; note = Dietzia aurantiaca
ggcgagagtggatcgatccgatccgtctcaggggcaacccctgggtacacatcacagttagttcctgcgtccggtgccgcacggcacgctccgcgtgcgaatcggcaccgccgagacgagttcagggtcgcctc

SEQ ID NO: 18079 - RNA, 134 nt, unidentified
  source 1..134: mol_type = other RNA; note = Related to DWWG01000159.1; note = Candidatus Dietzia intestinigallinarum
ggcgagagtggatcgattcgatccgtctcaggggcaacccctgggtgcacatcacaaccgggcactgcgtccggagccgcacggcacgctccgcgtgcgcatcggcaccgccgagacgagttcagggtcgcctc

SEQ ID NO: 18080 - RNA, 134 nt, unidentified
  source 1..134: mol_type = other RNA; note = Related to DXGN01000154.1; note = Candidatus Dietzia merdigallinarum
ggcgagagtggatcgatccgatccgtctcaggggcaacccctgggtacacaccacagctggcatctgcgtccggtgccgcacggcacgcttcgcgtgcgaatcggcaccgccgagacgagttcagggtcgcctc

SEQ ID NO: 18081 - RNA, 132 nt, unidentified
  source 1..132: mol_type = other RNA; note = Related to JAKWBF010000007.1; note = Gordonia sp.
ggcgagagtggatcaatcgatccgtctcaggggcaacccctgggtacattccacagttggtctctgcgtccgacgccggacggcacgcttcgcgtgcttcacggcgccgctgctgcacgttccggtcatccc

SEQ ID NO: 18082 - RNA, 133 nt, unidentified
  source 1..133: mol_type = other RNA; note = Related to CP045804.1; note = Gordonia amarae
tgtgagagtggatcgagagatccgtctcaggggtaacccctgggtgcagttcacagcaagaccccgcggccggagccacgccgcacgctgtgcgtgccggatggcaccgcgaacaccggtgtgaggtcacagc

SEQ ID NO: 18083 - RNA, 133 nt, unidentified
  source 1..133: mol_type = other RNA; note = Related to NZ_BMCS01000002.1; note = Williamsia phyllosphaerae
gatgagagtgggtcgtcacgacccgtctcaggggtaacccctgggtacacctcacagttggtccctgcgtccgacgccatgcggcacgctgcgcgtgcttcgcggcgccgcgatacgagttctcggtcacctc

SEQ ID NO: 18084 - RNA, 133 nt, unidentified
  source 1..133: mol_type = other RNA; note = Related to NZ_RBKV01000001.1; note = Williamsia muralis
ggcgagagtgggttctccgaacccgtctcaggggcaacccctgggtacatctcacagttggtatcagcgtccgacgccggcaggcacgctccgcgtgctacacggcgccgcagacgagagttctggtcgcccc

SEQ ID NO: 18085 - RNA, 134 nt, unidentified
  source 1..134: mol_type = other RNA; note = Related to NZ_JAFRDR010000008.1; note = Williamsia soli
ggtgagagtgggttcttcgaacccgtctcaggggcaacccctgggtacatctcgcagttggtatcagcgtccgacgccgctccgcacgctccgcgtgccagccggcgccgccgacacaagctcgtggtcacctc

SEQ ID NO: 18086 - RNA, 132 nt, unidentified
  source 1..132: mol_type = other RNA; note = Related to NZ_CP011853.1; note = Gordonia phthalatica
tgcgagaggggtcgatcgacccgtctcgggggctacccccgggtgcatccacggtgagttctcgcgtcgcgcgcaggacggcacactccgtgtgcgccactgcgcgccgatgacgacaggtctggtcgcacc

SEQ ID NO: 18087 - RNA, 138 nt, unidentified
  source 1..138: mol_type = other RNA; note = Related to JAAYXO010000187.1; note = Gordonia sp.
cgggagggcggtgcgagaggggtctctcgatccgtctcaggggctacccctgggtgcattcacagttcggcagtgcgtcgcgcgcaggccggcacactccgtgtgcgacactgcgcgccgaagacgacaagtctgggt

SEQ ID NO: 18088 - RNA, 132 nt, unidentified
  source 1..132: mol_type = other RNA; note = Related to BAOP01000031.1; note = Gordonia malaquae
cgcgagagggatcgatgatccgtctcaggggctacccctgggttcatgcactgcacggcaccgcgtcgcacgcaggtcggcacacttcgtgtgcttcactgcgcgccgaggacgacaagtccaggtcgcgtc

SEQ ID NO: 18089 - RNA, 132 nt, unidentified
  source 1..132: mol_type = other RNA; note = Related to NZ_JACIFP010000001.1; note = Gordonia humi
cgcgagagggatcgatgatccgtctcaggggcatcccctgggttcatgcacggcacggcttcgcgtcgcgcgcagacgggcacactccgtgtacggcgctgcgcgccgagaacgacatgttctggtcgcgcc

SEQ ID NO: 18090 - RNA, 138 nt, unidentified
  source 1..138: mol_type = other RNA; note = Related to NZ_JABBNB010000006.1; note = Gordonia asplenii
gacgagagcgggggatcgcgagatcctcggtctcaggggctacccctgggttcatgcacagcgtgacatcacgtcccgcgcagccgagcacactgcgtgtgcaaccctgcgcggcggacgacaggtttcggtcgtccc

SEQ ID NO: 18091 - RNA, 134 nt, unidentified
  source 1..134: mol_type = other RNA; note = Related to JAHCSG010000002.1; note = Williamsia sp.
ggtgagagtggatcctcgcgatccgtctcaggggcaacccctgggttcagaccacagctacaccctgcgtccgacgccaccgggcacgctgcgcgtgcttcatggcgccgcgatgacgagttgacggtcaccct

SEQ ID NO: 18092 - RNA, 133 nt, unidentified
  source 1..133: mol_type = other RNA; note = Related to NZ_JXYP01000014.1; note = Williamsia herbipolensis
gacgagaacggggtgacacacccgtctcaggggcaacccctgggtacaccacacagcgagaccctgcgtccgacgccggaccgcacgctgcgcgtgcatcgcggcgccgaggacaggagaattcggtcgactc

SEQ ID NO: 18093 - RNA, 134 nt, unidentified
  source 1..134: mol_type = other RNA; note = Related to NZ_AUFT01000012.1; note = Nakamurella lactea
ggcgagagtgggtcgatgcgacccgtctcaggggtaacccctgggtgcagttcacagttggtatcagcgtccgacgccggaccacatgcttcgcgtgtccggcggcgccgcggacaggtgcggttggtcgcccc

SEQ ID NO: 18094 - RNA, 141 nt, unidentified
  source 1..141: mol_type = other RNA; note = Related to JABEND010000002.1; note = Nakamurella aerolata
ggcgagaacgggtacggcatcgctgtgccctggtcaggggaaacccctggcgaggcgagacagttgcaccacgcatccggcgccgccgcggcccgctccgcgggcgaaggggcgccgcgaacagcaggaactggtcgaccc

SEQ ID NO: 18095 - RNA, 134 nt, unidentified
  source 1..134: mol_type = other RNA; note = Related to NZ_CP070357.1; note = Tsukamurella tyrosinosolvens
ggtgaggtgggatccgcgagatccgtcccagcggtaaccgctgggggcactgcacagttacaccctgcgtcccacgccggcgcgtgcgctccgcgcaccacacggcgctccggggccttgttccaggtcacccg

SEQ ID NO: 18096 - RNA, 134 nt, unidentified
  source 1..134: mol_type = other RNA; note = Related to NZ_VIGX01000010.1; note = Tsukamurella conjunctivitidis
ggtgaggcgggatccgcgcgatccgtcccagcggtaaccgctgggagcactgcacagtcactccctgcgtcccgcgccggcctgtgcgcttcgcgcacctcgcggcgctccgggactctgttccaggtcacccg

SEQ ID NO: 18097 - RNA, 134 nt, unidentified
  source 1..134: mol_type = other RNA; note = Related to NZ_UHII01000001.1; note = Tsukamurella pulmonis
ggtgaggtgggatccacgcgatccgtctcagcggcaaccgctgggggcactgcacagtcacaccccgcgtcccacgccggacggtgcgctgcgcgcacgcgacggcgctccgggaacatgtttcaggtcacccg

SEQ ID NO: 18098 - RNA, 134 nt, unidentified
  source 1..134: mol_type = other RNA; note = Related to JAIULG010000072.1; note = Tsukamurella sp.
ggcgaggagggatcctcgcgatccgtcccagcggtaaccgctgggggcaccgcacagtcacaccctgcgtcccacgccggcgcgtgcgctgcgcgcaccacacggcgctccgggaccttgttccaggtcacccg

SEQ ID NO: 18099 - RNA, 134 nt, unidentified
  source 1..134: mol_type = other RNA; note = Related to AP025688.1; note = Tsukamurella sp.
ggtgaggcgggatccatgcgatccgtcccagcggtaaccgctgggggctctgcacagctacacctcgcgtcccacgccggtcagtgcgctgcgcgcaccagacggcgctccgggaactcgttccaggtcacccg

SEQ ID NO: 18100 - RNA, 134 nt, unidentified
  source 1..134: mol_type = other RNA; note = Related to NZ_LSRF01000001.1; note = Tsukamurella pseudospumae
ggtgaggtgggatccttgcgatccgtcccagcggcaaccgctgggggctctgcacagttacaccccgcgtcccacgccggtccgtgcgctccgcgcaccgggcggcgctccgggcgagtgtttcaggtcacccg

SEQ ID NO: 18101 - RNA, 134 nt, unidentified
  source 1..134: mol_type = other RNA; note = Related to CP001966.1; note = Tsukamurella paurometabola
ggggaggcgggatccgcgcgatccatcccagcggtaaccgctgggcgcaccacacggctacaccacgcgtcccacgccggacggggcgctacgcgccctcctcggcgctgcgggcgactgtttcaggtccgccg

SEQ ID NO: 18102 - RNA, 134 nt, unidentified
  source 1..134: mol_type = other RNA; note = Related to BPMV01000001.1; note = Tsukamurella sp.
ggggaggcgggatccgcgcgatccatcccagcggtaaccgctgggtgcaccacacggctacacctcgcgtcccacgccggcccgggcgcttcgcgcccctcgcggcgctgtgggcgattgtttctggtcacccg

SEQ ID NO: 18103 - RNA, 147 nt, unidentified
  source 1..147: mol_type = other RNA; note = Related to NZ_CP070609.1; note = Rhodococcus koreensis
ggtgagagtggtgtggccggttcgccgaccgcgaccacgtcaggggtaacccctggctcgacagtgttcaccggagacaccgtccgacgcgcgaccgcatgctccgcgtgctccggcgcgccgcagacgacaggtatcggtcacctc

SEQ ID NO: 18104 - RNA, 147 nt, unidentified
  source 1..147: mol_type = other RNA; note = Related to CP003949.1; note = Rhodococcus opacus
ggtgagagtggtgtggccggttcgccggccgcgaccacgtcaggggaaacccctggctcgacagtgttcatcggagacaccgtccgacgcgcgaccgtatgctccgcgtgcttcggcgcgccgcagacgacagatatcggtcacctc

SEQ ID NO: 18105 - RNA, 147 nt, unidentified
  source 1..147: mol_type = other RNA; note = Related to NZ_CP058638.1; note = Rhodococcus sp.
ggtgagagtggggtggccggtacgccggctgcgaccacgtcaggggtaacccctggctcggcattgttcaccggaggcaccgtccgacgcacgaccgcacgctccgcgtgcttcggcgcgccgcagacgacaggtatcggtcgcctc

SEQ ID NO: 18106 - RNA, 145 nt, unidentified
  source 1..145: mol_type = other RNA; note = Related to NZ_VLNY01000005.1; note = Rhodococcus cavernicola
ggcgagtggtgcagccggttcgccggttgtggccgcgtcaggggtaacccctggcttgtcagtatcagccggacgcaccgtccgacgcacgaccgcacgcttcgcgtgcctgagtgcgccgcagacgacagttatcggtcgcccc

SEQ ID NO: 18107 - RNA, 141 nt, unidentified
  source 1..141: mol_type = other RNA; note = Related to JACHWS010000003.1; note = Hoyosella altamirensis
cgcgagagtgggagggctgtcgccctttccatgtccggggtaaccccgggctgcgcgttgcaagttgggcacatcgtccgacgcacttcggcacgctccgcgtgcgcccgtgcgccgctgacgacaggttatggtcgcgcc

SEQ ID NO: 18108 - RNA, 141 nt, unidentified
  source 1..141: mol_type = other RNA; note = Related to NZ_QRCM01000001.1; note = Rhodococcus rhodnii
cgcgagagcggatcggccgattcgtcggcacgatccgggtcaggggcaacccctggcacacggatatcggcagggcacaccgtccgacgcactcccgcgcgctccgcgcgccaccgtgcgccgcagacgacaggtctcggt

SEQ ID NO: 18109 - RNA, 138 nt, unidentified
  source 1..138: mol_type = other RNA; note = Related to NZ_CP018082.1; note = Nocardia mangyaensis
agcgagagtggggttgaaaggcgacccatctcaggggtaacccctgggggcttcttgtcggttgggtacagcgtccggagcaagggcgcacgcttcgcgtgcagcgcagcaccgtggacgaaggattctggtcgctcc

SEQ ID NO: 18110 - RNA, 135 nt, unidentified
  source 1..135: mol_type = other RNA; note = Related to NZ_BDBG01000003.1; note = Nocardia salmonicida
ggcgagagcgggtcgggtcgacccacctcaggggtaacccctgggagcgtcttgtcagttgggctcagcgtccggagcaagggcgcacgcttcgcgtgcctcgcagcaccgcggacgaaggattctggtcgcccc

SEQ ID NO: 18111 - RNA, 135 nt, unidentified
  source 1..135: mol_type = other RNA; note = Related to NZ_JACVEE010000002.1; note = Nocardia sp.
ggcgagtgtgggtcgatgcgacccgtctcaggggtaacccctgggtcaggcaggtcagttgggcacagcgtccgaaaccacagggcacgctccgcgtgcatcttggtacgaaggacgaagggttctggtcgcctc

SEQ ID NO: 18112 - RNA, 135 nt, unidentified
  source 1..135: mol_type = other RNA; note = Related to NZ_JAGGMR010000001.1; note = Nocardia goodfellowii
ggcgagagtgggtcgaagcgacccgtctcaggggaaacccctgggtcaggcagatcagttgggcacagcgtccgaaaccaccgggcacgctccgcgtgcgtcctggtacggaggacgaagggttctggtcgcctc

SEQ ID NO: 18113 - RNA, 135 nt, unidentified
  source 1..135: mol_type = other RNA; note = Related to NZ_BAGK01000206.1; note = Nocardia thailandica
ggtgagagcgggtcggtaggacccacctcaggggcaacccctgggaacgacacatcgatcgggtacagcgtccggagccggcgcgcacgcaccgagtgcctcgcggcaccgcggacgagagatttcggtcgccac

SEQ ID NO: 18114 - RNA, 135 nt, unidentified
  source 1..135: mol_type = other RNA; note = Related to NZ_BDAY01000016.1; note = Nocardia altamirensis
ggcgagagtgggtcgatcgggcccgtctcaggggtaacccctgggggcatttcagcagttgggttcagcgtccgaagccgctccgcacgctccgcgtgccggccggcgccgaggacgagagattgtggtcgcccc

SEQ ID NO: 18115 - RNA, 135 nt, unidentified
  source 1..135: mol_type = other RNA; note = Related to NZ_JAEMNV010000003.1; note = Antrihabitans stalagmiti
ggcgagagtgggtcgatcggacccgtctcaggggcaacccctgggtatgacagatcagttgggcactgcgtccgaagccggcccgcgcgctccgcgcgcatcgcggcgccgaggacgaaggattcaggtcgcccc

SEQ ID NO: 18116 - RNA, 132 nt, unidentified
  source 1..132: mol_type = other RNA; note = Related to NZ_BCRU01000034.1; note = Smaragdicoccus niigatensis
ggtgagcgaggaccgagaaggtctgtctcaggggtaacccctgggtgcgtcgaatcagttggcaacagcgtccgaagccgctgggcacgctccgcgtgcggcccggcgacaaagacaagagcaggtcgtcgg

SEQ ID NO: 18117 - RNA, 135 nt, unidentified
  source 1..135: mol_type = other RNA; note = Related to VLIY01000014.1; note = Skermania sp.
ggcgagcgtgggtcgatcaggccctcctcaggggcaacccctgggtgcacatcatcagttgggcacagcgtccggagccgctcggcgcgctgcgcgagctacacggcgccaaggacgatagtttttggtcgcccc

SEQ ID NO: 18118 - RNA, 136 nt, unidentified
  source 1..136: mol_type = other RNA; note = Related to JAFBBK010000001.1; note = Rhodococcus corynebacterioides
ggcgagagtgggtcctgcgcgaccctcctcgagggcaaccctcgggaacgatcacggaatcgggcactgcgtccgacgcacctcggcacgctccgcgtgctggagcgcgacgacgacgagagtctcaggtcgcctc

SEQ ID NO: 18119 - RNA, 136 nt, unidentified
  source 1..136: mol_type = other RNA; note = Related to LMRP01000002.1; note = Rhodococcus sp.
ggcgagagtgggtcctgcgagacccgactcgagggaaaccctcgggaacattcacagaaccggtcactgcttccgacgcgcccgagcacgctccgcgtgcctccgcgcgacgacgacgacagtcttcggtcgcccc

SEQ ID NO: 18120 - RNA, 151 nt, unidentified
  source 1..151: mol_type = other RNA; note = Related to JABUBR010000003.1; note = Rhodococcus corynebacterioides
ggcgagagtggggtcgaccggagttcgcggccggtcacccgtctcgggggcaacccccgggtacgagaacacagccgatcactgcgtccgacgcaggaatgcacgctccgcgtgctgcgctgcgccgccgacgggagagcatggtcgcccc

SEQ ID NO: 18121 - RNA, 142 nt, unidentified
  source 1..142: mol_type = other RNA; note = Related to NZ_BMCU01000001.1; note = Rhodococcus trifolii
ggcgagagcgggtctgccaccatcgaggcccatctcaggggtaacccctggggcgaacatcttcatcggtcactgcgtccgaagcaggagtgcacgctccgcgtgctgcgctgctccgcggacggaagaagcaggtcgcccc

SEQ ID NO: 18122 - RNA, 135 nt, unidentified
  source 1..135: mol_type = other RNA; note = Related to NZ_CP032762.1; note = Rhodococcus sp.
ggcgagagttggtccgctgggccgatcccaggggtaacccctgggcgagagagaagaactgggcactgcgtccgatgccggtccgcacgctccgcgtgcttgacggcgccgagtacgaaagattcaggtcgcccg

SEQ ID NO: 18123 - RNA, 135 nt, unidentified
  source 1..135: mol_type = other RNA; note = Related to NZ_NPFR01000010.1; note = Rhodococcus sp.
ggcgagagtcggtccgctgggccgatctcaggggtaacccctgggcgagacagaagaactggtcactgcgtccgacgccggtccgcacgctccgcgtgctcggcggcgccgagtacacaagattcaggtcgcccg

SEQ ID NO: 18124 - RNA, 135 nt, unidentified
  source 1..135: mol_type = other RNA; note = Related to NZ_LVCV01000404.1; note = Rhodococcus sp.
ggcgagtgtcggtccgcgcgaccgatctcaggggcaacccctgggtgggaaagaagaactgggcactgcgtccgacgccggtccgcacgctccgcgtgcacgacggcgccgagcacgaaagattcaggtcgcccg

SEQ ID NO: 18125 - RNA, 135 nt, unidentified
  source 1..135: mol_type = other RNA; note = Related to NZ_JABFAO010000002.1; note = Rhodococcus sp.
ggtgagagttggtccgaagggccgatcccaggggcaacccctgggcgagaaagaagaactgggcactgcgtccgacgccgctccgcacgctccgcgtgcacgccggcgccgagtacgaaagattcaggtcacccg

SEQ ID NO: 18126 - RNA, 135 nt, unidentified
  source 1..135: mol_type = other RNA; note = Related to LVHI01000032.1; note = Rhodococcus kyotonensis
ggcgagagttggtccgcgcgaccatcctcaggggtaacccctgggtgtgagagaacaaccggtcactgcgtccgacgccgctccgcacgctccgcgtgccagacggcgccgagtacgaaagtttcaggtcgcccg

SEQ ID NO: 18127 - RNA, 135 nt, unidentified
  source 1..135: mol_type = other RNA; note = Related to NZ_CP010797.1; note = Rhodococcus sp.
ggcgagagttggtccgcgggaccggtctcaggggtaacccctgggtacatcacgagaatcgagcactgcgtccgaagctggtctgcacgctccgcgtgcttggcagctccgaggacgaaagatttcggtcgcccc

SEQ ID NO: 18128 - RNA, 135 nt, unidentified
  source 1..135: mol_type = other RNA; note = Related to NZ_JABFAU010000077.1; note = Rhodococcus sp.
ggcgagagttggtccgtagggccggtctcaggggcaacccctgggtgcatcacgagaatcgatcactgcgtccgaagcagctctgcacgcttcgcgtgctcgactgctccgaggacgaaagatttcggtcgcccc

SEQ ID NO: 18129 - RNA, 135 nt, unidentified
  source 1..135: mol_type = other RNA; note = Related to CP015235.1; note = Rhodococcus fascians
ggcgagagttggtccgcgggaccggtctcaggggtaacccctgggtacatattgagaatcgagcactgcgtccgaagcagctccgcacgctacgcgtgcccgactgctccgaggacgaaagatttcggtcgcctc

SEQ ID NO: 18130 - RNA, 135 nt, unidentified
  source 1..135: mol_type = other RNA; note = Related to NZ_CP039254.1; note = Rhodococcus sp.
ggcgagagttggtccgtgcgaccaagctcaggggtaacccctgggagagaattgagaatcggtcactgcgtccgaagcagctcggcacgctccgcgtgcttgactgctccgaggacgaaagatttcggtcgcccc

SEQ ID NO: 18131 - RNA, 134 nt, unidentified
  source 1..134: mol_type = other RNA; note = Related to NZ_CP007255.1; note = Rhodococcus erythropolis
ggtgagagttggtccacgcgaccagtctcaggggtaacccctgggtcggccagaagaattggatactgcgtccaccggcgttcggcacgctccgcgtgcttgccgccgcaccggacaaaggatttggtcacccc

SEQ ID NO: 18132 - RNA, 149 nt, unidentified
  source 1..149: mol_type = other RNA; note = Related to JAGRPD010000186.1; note = Verrucomicrobiales bacterium
ccccagcctgactccgaagtgagcccacgcttccttcgcggtccgtccggggcatccccgggctgcatgaaacacctcaccataccgtcgcgccagcccctccgcgctccacgcggcacggctgcgcgcacaacgggcttcgtgggggc

SEQ ID NO: 18133 - RNA, 149 nt, unidentified
  source 1..149: mol_type = other RNA; note = Related to JAJTHZ010000014.1; note = Xanthomonadaceae bacterium
cccgagttcatgccgtgatcgatgcgtaacgtcgaatccggccgccgcggggtttccccgcggtgagacaccgcacatcgggctctacatggcagcgacgtacctgcgacacgtcgcagagcggtcgccgcagacgaagacgtcggggc

SEQ ID NO: 18134 - RNA, 139 nt, unidentified
  source 1..139: mol_type = other RNA; note = Related to NZ_JACCBH010000001.1; note = Microbacterium pseudoresistens
gacgaggcgggtggtacacgcgttgtcccgccctctccggggctaccccggggtacgcaggctgatcaggaacgaccgccgcaggcacctcactgcgcttcgcgcagaccggcgcccgcactgatggacgagtcgtccg

SEQ ID NO: 18135 - RNA, 139 nt, unidentified
  source 1..139: mol_type = other RNA; note = Related to NZ_BMCM01000001.1; note = Microbacterium murale
gacgaggcgagtggttcacgatgtgttccgctctctccggggtcaccccggggtacgcagtctgacctggaacgaacgccgcaggcgcctccttgcgcttcgcgcaatacagcgcccgcactgatggatgagtcgtacg

SEQ ID NO: 18136 - RNA, 139 nt, unidentified
  source 1..139: mol_type = other RNA; note = Related to NZ_PCOT01000008.1; note = Microbacterium sp.
agcgagacgggtggttcacgcggtgagccatcctctccggggataccccggggcacgcaggccgatctggaacgaacgccgcaggcgcctccctgcgcttcgcgcagtacagcgcccgcactgatggacgagtcgcgcg

SEQ ID NO: 18137 - RNA, 139 nt, unidentified
  source 1..139: mol_type = other RNA; note = Related to NZ_JAFBBQ010000001.1; note = Microbacterium keratanolyticum
gacgaggcgggtggttcacgaggtgttccatcctctccggggataccccggggcacgcaggctgagctgacagaaacgccgcaggcgcctccctgcgcttcgcgcagtacagcgcccgcactgatggacgagtcgtgcg

SEQ ID NO: 18138 - RNA, 139 nt, unidentified
  source 1..139: mol_type = other RNA; note = Related to NZ_CP035375.1; note = Salinibacterium sp.
gtcgaggcggatggagcgcgagccgttctatcctcttcggggataccccgaggtacgcagactgagttacgacacacgccgcgggcgcgccactgcgcttcgcgcagcaatgcgcccgcagtgacagacaggtcgatct

SEQ ID NO: 18139 - RNA, 139 nt, unidentified
  source 1..139: mol_type = other RNA; note = Related to LMDN01000001.1; note = Leifsonia sp.
gacgaggtgggtggtgcacgagctgttcctccctctccggggctaccccggggcacgcagaccgagatgagacaaacaccgtcggcaccacgctgcgctccgcgcagctccgtgccgacaccgatcgacgagtcgtccg

SEQ ID NO: 18140 - RNA, 139 nt, unidentified
  source 1..139: mol_type = other RNA; note = Related to NZ_JPRS01000007.1; note = Cryobacterium sp.
ggcgaggtggatggtgcatgcgttgtaccgtcctctccggggataccccggggcacgaagatcgactgtgaacgaccgccgcaggcgcatttctgcgctccgcgcagccccgcgcctgcactgagagacgagtcgtccg

SEQ ID NO: 18141 - RNA, 139 nt, unidentified
  source 1..139: mol_type = other RNA; note = Related to NZ_PJJO01000056.1; note = Cryobacterium sp.
ggcgaggcgggtggtacacgcgttgtgctgccttctccggggctaccccggggcacgaaggtcatctgtgaacgagcgccgcaggcgcgtctctgcgctccgcgcagcacggcgcctgcacgaagggacgagtcgcccg

SEQ ID NO: 18142 - RNA, 139 nt, unidentified
  source 1..139: mol_type = other RNA; note = Related to NZ_JACHBQ010000001.1; note = Cryobacterium roopkundense
ggcgaggcgggtagtgcacgtgatgtgctgccctctccggggttaccccggggcacgaagaccgacctggaacgagcgccgcaggcgcgtctctgcgctccgcgcagctcggcgcctgcacccagtgacgagtcgcccg

SEQ ID NO: 18143 - RNA, 139 nt, unidentified
  source 1..139: mol_type = other RNA; note = Related to NZ_QZVS01000068.1; note = Cryobacterium melibiosiphilum
ggcgaggcgggtggtgcacgcgttgcgccgccctctccggggctaccccggggcacgcagaccgaccaggacagaccaccgcaggcacgccactgcgctccgcgcagctcggtgcccgcaccgatggacgagtcgcccg

SEQ ID NO: 18144 - RNA, 139 nt, unidentified
  source 1..139: mol_type = other RNA; note = Related to SOHE01000083.1; note = Cryobacterium sp.
ggcgaggcgggtggtgcacgcgttgcgccgccctctccggggctaccccggggcacgcagaccgaccaggaacgaacaccgcaggcacgccactgcgctccgcgcagctcggtgcccgcaccgatcgacgagtcgcccg

SEQ ID NO: 18145 - RNA, 139 nt, unidentified
  source 1..139: mol_type = other RNA; note = Related to NZ_JAALGE010000001.1; note = Marisediminicola senii
aacgaggtggcaggtacccgagcggtgcccgcctctccggggttaccccggggcacgcaggccgagatggaacgagcgccgcgggcgcggccctgcgcttcgcgcagccgtgcgcccgcacgaacggacgagtcgtccg

SEQ ID NO: 18146 - RNA, 139 nt, unidentified
  source 1..139: mol_type = other RNA; note = Related to JABMLG010000003.1; note = Microbacteriaceae bacterium VKM Ac-2855
cgcgaggcggacggtggcacgcgatgcaccgtcctctccggggctaccccggggcacgaagaccgactgagccacgcgacgcaggcgcctctctgcgcttcgcgcagccgagcgcccgcactgatcgacaggtcgcgcg

SEQ ID NO: 18147 - RNA, 138 nt, unidentified
  source 1..138: mol_type = other RNA; note = Related to JABMLH010000001.1; note = Microbacteriaceae bacterium VKM Ac-2854
ggcgaggcggatcggcgcacgatgtgcgtcgtcctccccggggccaccccggggcacgaagaccgacggagagacgcggcgctgcgccacgctgcgcttcgcgcaggcgagcgcacgcacggagagacaggtcgcgcg

SEQ ID NO: 18148 - RNA, 139 nt, unidentified
  source 1..139: mol_type = other RNA; note = Related to NZ_CP017146.1; note = Marisediminicola antarctica
gacgaggtgggtggcacacgcgatgcgccgccatctccggggataccccggggcacgaagaccgacctggaacgagcgccgcaggcgcctccctgcgctccgcgcagctcagcgcccgcactgaaggacgagtcgtccg

SEQ ID NO: 18149 - RNA, 139 nt, unidentified
  source 1..139: mol_type = other RNA; note = Related to NZ_CP095501.1; note = Arthrobacter sp.
gccgaggcgggacgcgtacgcagtgcgcgttcctctccggggcaaccccggggcacgcagaccgaccagcacagggcgcctcaggcgcccgcctgcgctccgcgcagctcagcgcccgaacagagggacaggtcggccg

SEQ ID NO: 18150 - RNA, 139 nt, unidentified
  source 1..139: mol_type = other RNA; note = Related to NZ_PRKW01000004.1; note = Arthrobacter pityocampae
gccgaggcgggccgcgtacgccgtgcgcggtcctctccggggctaccccggggcacgcagaccgaccggcacagggcacctcaggcgcccgactgcgctccgcgcagctcagcgcccgaacagagtggcaggtcggccg

SEQ ID NO: 18151 - RNA, 139 nt, unidentified
  source 1..139: mol_type = other RNA; note = Related to NZ_CP024915.1; note = Arthrobacter agilis
gccgaggcggaacacgtacgcagtgcgcgttcctctccggggtcaccccggggcacgcagaccgaccagcacagggcgcctcaggcgcctgactgcgctccgcgcagctcagcgcccgaacagaaggacaggtcggccg

SEQ ID NO: 18152 - RNA, 140 nt, Vibrio sp.
  source 1..140: mol_type = other RNA; note = Related to WNZI01000030.1; note = Vibrio cholerae
gccgaggcggagcacgtacaccgtgcgcgctcctctccggggttaccccggggcacgcagaccgaccagcacagggcgcctcaggcacctgactgcgcttcgcgcagctcagcgcccgaacagagagaacaggtcggccg

SEQ ID NO: 18153 - RNA, 139 nt, unidentified
  source 1..139: mol_type = other RNA; note = Related to LR131272.1; note = Arthrobacter agilis
gccgaggcggtgcgcgtacgcagtgcgcgctcctctccggggctaccccggggcacgcagaccgaccagcacacggcgcctcaggcacctgactgcgcttcgcgcagctcagcgcccgaacaggaggacaggtcggccg

SEQ ID NO: 18154 - RNA, 139 nt, unidentified
  source 1..139: mol_type = other RNA; note = Related to LMLU01000001.1; note = Arthrobacter sp.
gccgaggcgggccacgtacgcggtacgcggtcctctccggggataccccggggcacgcagaccgaccagcacagagcgcctcgggcacctgactgcgctccgcgcagctcagcgcccgaacaggacgacaggtcggccg

SEQ ID NO: 18155 - RNA, 139 nt, unidentified
  source 1..139: mol_type = other RNA; note = Related to LGIU01000097.1; note = Arthrobacter sp.
gccgaggcggagcacgcacgcggtgcgcgttcctctccggggctaccccggggcacgcagatcgaccagcacagggcgcctcgggcacctgactgcgctccgcgcagcacagtgcccgaacagcaggacaggtcggccg

SEQ ID NO: 18156 - RNA, 137 nt, unidentified
  source 1..137: mol_type = other RNA; note = Related to NZ_JAFMPX010000005.1; note = Arthrobacter sp.
gacgaggtggaactgcactcgtgcaggttcctccccggggctaccccggggcacgtagtaccgctcgagaaggcgccgcgggtgggggctctgcgctccgcgcagcacaccacccgcaccgacagacaggtcgtctg

SEQ ID NO: 18157 - RNA, 139 nt, unidentified
  source 1..139: mol_type = other RNA; note = Related to VFOO01000001.1; note = Subtercola boreus
gacgaggtggacggttcaggttctgatccgtcctctccggggtcaccccggggtacgcaggccgactcaggcacttcgccgcaggcgtctcaccgcacttcgagcggccgaacgcccgcacagacgcacaggtcgtctg

SEQ ID NO: 18158 - RNA, 139 nt, unidentified
  source 1..139: mol_type = other RNA; note = Related to NBXA01000026.1; note = Subtercola boreus
gacgaggtggacggttcacgacgtgatccgccctctccggggccaccccggggtacgcagaccgactcaggcacttcgccgcaggcgtctcaccgcacttcgagcggccgcacgcccgcacagacgcacaggtcgtctg

SEQ ID NO: 18159 - RNA, 139 nt, unidentified
  source 1..139: mol_type = other RNA; note = Related to NZ_NBXE01000029.1; note = Subtercola boreus
gacgaggtggatggttcagacgctgatccgtcctctccggggctaccccggggcacgcagatcgattccggcacgacgtcgcaggcgcctctccgcactccgagcggccgagcgcccgcgcttcagcacaggtcgtctg

SEQ ID NO: 18160 - RNA, 145 nt, unidentified
  source 1..145: mol_type = other RNA; note = Related to RCUY01000005.1; note = Mycetocola lacteus
gtcgagaacgggagggcacaccatgcgttgctcccttccgctccggggtaaccccggggaccgcaaaccgagtaccaccacgcgccccgagtgcccgccgacgcttcgcgtcgcaccgcacacggccgcctcaaccggtcgatcg

SEQ ID NO: 18161 - RNA, 144 nt, unidentified
  source 1..144: mol_type = other RNA; note = Related to NZ_RCUX01000009.1; note = Mycetocola tolaasinivorans
gtcgagaacggagggcgaaacatgcgtgattcccttccgctccggggtaaccccgggggccgcagaccgagcaggaccacgcgccccgagtgcctcccgacgcttcgcgtcgcaccgcacacggccgcatcgaccggtcgatca

SEQ ID NO: 18162 - RNA, 140 nt, unidentified
  source 1..140: mol_type = other RNA; note = Related to NZ_CP080203.1; note = Mycetocola spongiae
ggtgaggcgggtgatccacatcatggtgacatcctccccggggttaccccggggcacgcagtccgagctattatccacgcctcgggtgccccgcagcgcttcgcgcagcccggcatccgagaccagtgcagggtcaccgc

SEQ ID NO: 18163 - RNA, 140 nt, unidentified
  source 1..140: mol_type = other RNA; note = Related to CP007595.1; note = Arthrobacter sp.
gatgaggcgggaggcgtccttgggcgcgcatccctccccggggctaccccggggcacgaattattgcctgattcatgcaccgcaggtgcgtcactgcgctccgcgcagcagcgcacccgcacagacagccaggtcatcgg

SEQ ID NO: 18164 - RNA, 140 nt, unidentified
  source 1..140: mol_type = other RNA; note = Related to CP013200.1; note = Arthrobacter alpinus
gatgaggcgggaagcgtcctttggcgcgcgtccctctccggggctaccccggggtatgcagtattgcctgatccatgcaccgcgggtgcgtcactgcgctccgcgcagcagcgcacccgcacagacagccgagtcatcaa

SEQ ID NO: 18165 - RNA, 140 nt, unidentified
  source 1..140: mol_type = other RNA; note = Related to NZ_JAGIOI010000001.1; note = Arthrobacter stackebrandtii
gatgaggcgggaagcggcctttggcgcgcatccctccccggggctaccccggggcacgaaatattgcctgatccatgcaccgcaggtgcggcactgcgctccgcgcagctgcgcacccgcacagacagccgggtcatcgg

SEQ ID NO: 18166 - RNA, 140 nt, unidentified
  source 1..140: mol_type = other RNA; note = Related to NZ_QJVC01000003.1; note = Arthrobacter psychrolactophilus
gatgaggcgggaagcgtctttcggcgcccatccctccccggggttaccccggggcacgcagttttgcctgatccatgcacctcggatgcgtcgttgcgctccgcgcaactgggcaaccgaacagacagccaggtcatcgg

SEQ ID NO: 18167 - RNA, 140 nt, unidentified
  source 1..140: mol_type = other RNA; note = Related to NZ_CZJT01000056.1; note = Paeniglutamicibacter antarcticus
gatgaggtgggaagcgttatttagcgcgctttccgctccggggttaccccgggggacgcagtcttacctgattcaagcaccgtgggtgcctcgctgcgctccgcgcaggagcgcacccacaccgatagccgggtcatcga

SEQ ID NO: 18168 - RNA, 140 nt, unidentified
  source 1..140: mol_type = other RNA; note = Related to NZ_CP013745.1; note = Arthrobacter alpinus
gatgaggcgggaagcggcttttggcgcgcctccctccccggggctaccccggggtacgcagtattgcctgatcgaagcacctcgggtgcggcgctgcgctccgcgcagctcggcacccggacagagcgccaggtcatcga

SEQ ID NO: 18169 - RNA, 140 nt, unidentified
  source 1..140: mol_type = other RNA; note = Related to NZ_JAAWVT010000016.1; note = Paeniglutamicibacter terrestris
gatgaggtgggaagcgtcttttagcacgcgttcctctccggggataccccggggtacgcagtattgcctgatccatgcaccgcaggtgcgtctctgcgcttcgcgcagctcggcacccgcacagacagctaggtcatcgg

SEQ ID NO: 18170 - RNA, 139 nt, unidentified
  source 1..139: mol_type = other RNA; note = Related to NZ_JAJJBU010000018.1; note = Arthrobacter cryoconiti
gatgaggtgggtacggcacctagtgcgcgtccctctccggggttaccccggggcttgcacgtcaccctgagacatccgcctcgggtgcctcactgcgctccgcgcagcagcgcacccgaacagagagtgaagtcatcca

SEQ ID NO: 18171 - RNA, 138 nt, unidentified
  source 1..138: mol_type = other RNA; note = Related to NZ_JAAKZI010000011.1; note = Arthrobacter silviterrae
gatgaggcgggcgggcacctggtgcaccaccctctccggggttaccccgggggacgaagactggcctccagcatgcgcctcgggcgcctgtctgcgctccgcgcagctcagcgcccgaacagactgacaggtcatcca

SEQ ID NO: 18172 - RNA, 139 nt, unidentified
  source 1..139: mol_type = other RNA; note = Related to NZ_CP029642.1; note = Arthrobacter sp.
gatgaggcgggcgggcatcacggtgcaccaccctctccggggctaccccggaggacgaagactggcctccagcaagcgcctcgggcgccactctgcgctccgcgcagccgcgcgcccgaacagacagacaggtcatcca

SEQ ID NO: 18173 - RNA, 139 nt, unidentified
  source 1..139: mol_type = other RNA; note = Related to NZ_CP012479.1; note = Arthrobacter sp.
gatgaggtgggtgggcatttgcgtgccctgccctctccggggataccccgggggacgaagaacgacctcctgcaagcaccgcagccgcctcgcagcgctccgcgcagcagggcggccgcacagactgacgggtcatccg

SEQ ID NO: 18174 - RNA, 139 nt, unidentified
  source 1..139: mol_type = other RNA; note = Related to NZ_PPXB01000002.1; note = Arthrobacter glacialis
gatgagatggggagtcaccttggtgacccaccctctccggggctaccccgggggacgaagacgtacctccagcatgcgccttgggcgcgccgctacgctccgcgaagcgcggcgcccaaacagacagattggtcatcat

SEQ ID NO: 18175 - RNA, 139 nt, unidentified
  source 1..139: mol_type = other RNA; note = Related to NZ_KI519454.1; note = Arthrobacter sp.
gatgaggtgggcagtgccttgaaagcacttccctctccggggctaccccggggcacgcagttcgaccagcaccacgcgccgtgggcccgcccctgcgctccgcgcagcacggggcccacacagacagatgggtcatccg

SEQ ID NO: 18176 - RNA, 139 nt, unidentified
  source 1..139: mol_type = other RNA; note = Related to NZ_PJIO01000003.1; note = Arthrobacter sp.
gatgaggtgggagaaacacgtggtgtctatccctctccggggttaccccggggcacgcaatattgcctggaccatgcaccgcaggtgcggctctgcgctccgcgcagcacggcacccgcacagatagttaagtcatccg

SEQ ID NO: 18177 - RNA, 139 nt, unidentified
  source 1..139: mol_type = other RNA; note = Related to CP012677.1; note = Arthrobacter alpinus
gatgaggcgggagaaacactttgtgttcatccctctccggggttaccccggggtacgcagtattgcctggaccatgcaccgctggtgcctcactgcgctgcgcgcagccgggcaccagcacagacagccaagtcatccg

SEQ ID NO: 18178 - RNA, 136 nt, unidentified
  source 1..136: mol_type = other RNA; note = Related to JABBNV010000050.1; note = Acidobacteria bacterium
ggcgaggctggattgcaactagttgcagtcctctccggggctaccccggggtacaaggcacggatggccattgcaccgcgggtggggcactgcgcttcgcgcagctcgccacccgcacagactgacaggtcgccgg

SEQ ID NO: 18179 - RNA, 139 nt, unidentified
  source 1..139: mol_type = other RNA; note = Related to NZ_JADNYM010000009.1; note = Arthrobacter sp.
gatgaggcgggtggtgtacttcgtataccgtcctctccggggctaccctggggcacgcagaattacctgaagcaagcgccgcaggcgccagactgcgctccgcgcagctgcgcgcccgcacagatagacgggtcatcca

SEQ ID NO: 18180 - RNA, 140 nt, unidentified
  source 1..140: mol_type = other RNA; note = Related to NZ_JAATJL010000001.1; note = Arthrobacter pigmenti
gacgaggcggatggtgcacgcgatgttccatcctctccggggctaccccgggggacgcagatagacctcacacagagcgcctcaggtgcgacgctgcgcttcgcgcagtcaggcacccgaacggacaggcaggtcgtccg

SEQ ID NO: 18181 - RNA, 139 nt, unidentified
  source 1..139: mol_type = other RNA; note = Related to NZ_JAAOYV010000002.1; note = Frigoribacterium endophyticum
ggcgaggcgggtgctccacgcgctggatcaccctctccggggcaaccccggggcacgcagttcgaccacggcaccgctccccgagccgaccaccgcgctgcgcgcggagaccggcccggaccgacgcacgagtcgccgg

SEQ ID NO: 18182 - RNA, 139 nt, unidentified
  source 1..139: mol_type = other RNA; note = Related to RKIE01000002.1; note = Frigoribacterium sp.
gacgaggcgggcggcctccgcgtgaggtcgtcctctccggggcaaccccggggcacgcagtcagaccacggcaccgctccccgagccggtcaccgcgctccgcgcggcgggcggcacggaccgacgcacgagtcgtcac

SEQ ID NO: 18183 - RNA, 139 nt, unidentified
  source 1..139: mol_type = other RNA; note = Related to NZ_LMQR01000001.1; note = Frigoribacterium sp.
ggcgaggtggacggcacacgcgctgtgccttcctctccggggctaccccggggcacgcagatcgaccacggcaccgcaccgcaggccggtgaccgcgcttcgcgcggctcgcggcccgcaccgacgcacgagtcgccga

SEQ ID NO: 18184 - RNA, 139 nt, unidentified
  source 1..139: mol_type = other RNA; note = Related to NZ_CP014619.1; note = Frondihabitans sp.
gacgaggcggacggcgcaggctctgcgccgtcctctccggggctaccccggggcacggagaacgaccaggaacacgcaccgcaggagccagaccgcgcggagcgcggtccagcacccgcaccgatggacgagtcgtccg

SEQ ID NO: 18185 - RNA, 138 nt, unidentified
  source 1..138: mol_type = other RNA; note = Related to NZ_PVTL01000004.1; note = Glaciihabitans tibetensis
gttgaggtgggtggttcacgagttgtgccaccctctccggggataccccggggtacgcagaacaccagaaacacgcgccgcaggcgcctgagtgcgcttcgcgcaccacagcgcccgcacagacggacgagtcgaccg

SEQ ID NO: 18186 - RNA, 139 nt, unidentified
  source 1..139: mol_type = other RNA; note = Related to JADKRN010000004.1; note = Agreia pratensis
gacgaggtgggtggagtcgacagacggacaccctctccggggtcaccccggggtatgaatctcagcccgagcgcacaaccgcaggcactccaccgcgcttcgcgcggccgcgtgcccgcaacgatcgattggtcgtccg

SEQ ID NO: 18187 - RNA, 139 nt, unidentified
  source 1..139: mol_type = other RNA; note = Related to NZ_FXAY01000002.1; note = Agreia pratensis
gacgaggtgggtggagtcgacagacggacaccctctccggggtcaccccggggtatgaatctcagcccgagcgcacaaccgcaggcactccaccgcgcttcgcgcggccgcgtgcccgcaccgatcgattggtcgtccg

SEQ ID NO: 18188 - RNA, 139 nt, unidentified
  source 1..139: mol_type = other RNA; note = Related to FUYG01000003.1; note = Agreia bicolorata
gacgaggcgggtggagtcgacagacgaacaccctctccggggtcaccccggggtacaactctcagcctgaacgcacaaccgcaggcaccacaccgcgcttcgcgcggtcgcgtgcccgcaccgatcgatcggtcgcccg

SEQ ID NO: 18189 - RNA, 139 nt, unidentified
  source 1..139: mol_type = other RNA; note = Related to LMNF01000001.1; note = Agreia sp.
ggcgaggtgaacggcgtcgcgagacgatcgttctctccggggccaccccggggcacacatcccagccagaacgcacaaccgcaggcaccgcaccgcgcttcgcgcggccgggtgcccgcaccgatcgatcggtcgcccg

SEQ ID NO: 18190 - RNA, 139 nt, unidentified
  source 1..139: mol_type = other RNA; note = Related to NZ_LR882035.1; note = Agreia sp.
agcgaggtgggtggcgtctcgcgatgctcaccctctccggggctaccccggggcacttctcctagcctccacacggaaccgcaggcactacaccgcgcttcgcgcggccatgtgcccgcaccgatcgactggtcgctcg

SEQ ID NO: 18191 - RNA, 139 nt, unidentified
  source 1..139: mol_type = other RNA; note = Related to NZ_KI914784.1; note = Arthrobacter sp.
gccgaggcggagagtgcacgaggtgcgccctcctctccggggttaccccggggtacgcagatcgaccaggacaaagcgccgcaggcacgtgacagcgctccgcgcagcacagagcccgcacggacggacaggtcggccg

SEQ ID NO: 18192 - RNA, 138 nt, unidentified
  source 1..138: mol_type = other RNA; note = Related to CP047186.1; note = Rathayibacter sp.
ggcgaggcggacggggcacgcgctgctccgtcctctccggggtcaccccggggcacgtggatcaaccaggcatcgcgccgcaggcacccgcccgcgctgcgcgcggctcagcgcccgcacttctcgacaggtcgcccg

SEQ ID NO: 18193 - RNA, 138 nt, unidentified
  source 1..138: mol_type = other RNA; note = Related to NZ_CP047180.1; note = Rathayibacter festucae
ggcgaggcggacggggcacgcgctgctccgtcctctccggggtcaccccggggcacgtggatcgaccaggcatcacgccgcaggcacccacccgcgctccgcgcggcacagcgcccgcacagctcgacaggtcgcccg

SEQ ID NO: 18194 - RNA, 138 nt, unidentified
  source 1..138: mol_type = other RNA; note = Related to NZ_FXBM01000004.1; note = Rathayibacter oskolensis
ggcgaggcggacggggcacgagctgcaccgtcctctccggggtcaccccggggcacgtggatcgaccaggcatcacgccgcaggcacccgccggcgctccgcgccgctcagcgccagcacttctcgacaggtcgcccg

SEQ ID NO: 18195 - RNA, 138 nt, unidentified
  source 1..138: mol_type = other RNA; note = Related to NZ_PZPL01000001.1; note = Rathayibacter caricis
ggcgaggcggacgatgcacgagctgcaccgtcctctccggggtcaccccggggcacgtggatcgaccaggcaccgcaccgcaggcacccgcccgcgctccgcgcggctcagcgcccgcacttcccgacaggtcgcccg

SEQ ID NO: 18196 - RNA, 139 nt, unidentified
  source 1..139: mol_type = other RNA; note = Related to NZ_LMMJ01000014.1; note = Curtobacterium sp.
accgaggcggccggcgcacgctgtgcgtcgacctctccggggctcccccggggcacgaagtacacccatgaccgtccacctcaggagaagaggcgcgctccgcgcaccgtccctcccgaaccacacgacgagtcggtcg

SEQ ID NO: 18197 - RNA, 139 nt, unidentified
  source 1..139: mol_type = other RNA; note = Related to LMPO01000009.1; note = Curtobacterium sp.
ggggaggcggacggcgcgcgagacgcgccgacctctccggggtcaccccggggcacgcaggaccagcaggaccacacgccccgagaggctcggcgcgctccgcgcgctcgccctcacggaggcaccgacaggtcccccg

SEQ ID NO: 18198 - RNA, 139 nt, unidentified
  source 1..139: mol_type = other RNA; note = Related to JALGRO010000013.1; note = Curtobacterium sp.
ggggaggcggacggcgcgcgtgacgcgtcgacctctccggggtcaccccggggcacgcagtaccagcaggacgacacgccccgagaggctcggcgcgctccgcgcgcgctccctcacggaggcaccgacaggtcccccg

SEQ ID NO: 18199 - RNA, 139 nt, unidentified
  source 1..139: mol_type = other RNA; note = Related to MJGI01000025.1; note = Curtobacterium sp.
ggggaggcggacggcgcgcgtgacgcgccgacctctccggggtcaccccggggcacgcagtaccagcaggaccacacgccccgagaggcacggcgcgctccgcgcactcgccctcacggaagcactgacaggtctcccg

SEQ ID NO: 18200 - RNA, 139 nt, unidentified
  source 1..139: mol_type = other RNA; note = Related to MJGP01000013.1; note = Curtobacterium sp.
ggggaggcggacggcgcgcgtgacgcgtcgacctctccggggtcaccccggggcacgcaggaccagcaggaccacacgccccgagaggcgcggcgcgctccgcgcaccagccctcacggaggcaccgacaggtcccccg

SEQ ID NO: 18201 - RNA, 139 nt, unidentified
  source 1..139: mol_type = other RNA; note = Related to JACGXP010000002.1; note = Curtobacterium pusillum
ggggaggcggccggcgcgcgtgacgcgccgacctccccggggtcaccccggggcacgcggtaccagcaggacgacacgccccgagcgggcaggcgcgctccgcgcgcgacgccgcacggaggcaccgacgggtcctccg

SEQ ID NO: 18202 - RNA, 139 nt, unidentified
  source 1..139: mol_type = other RNA; note = Related to JAFBBT010000001.1; note = Curtobacterium herbarum
ggggaggcggacggcgcgcgtgacgcgtcgacctctccggggtcaccccggggcacgcaggaccagcaggaccacacgccccgagaggctcggcgcgctccgcgcgcgcgtcctcacggaggcaccgacaggtcccccg

SEQ ID NO: 18203 - RNA, 139 nt, unidentified
  source 1..139: mol_type = other RNA; note = Related to QKLJ01000002.1; note = Curtobacterium sp.
ggggaggcggacggcgcgcgtgacgcgtcgacctctccggggtcaccccggggtacgcaggaccagcagcaccacacgccccgagaggctcggcgcgctccgcgcgcgcgacctcacggaggcaccgacaggtctcccg

SEQ ID NO: 18204 - RNA, 139 nt, unidentified
  source 1..139: mol_type = other RNA; note = Related to NZ_CP017580.1; note = Curtobacterium sp.
ggggaggcggccgacgcgcgtgacgcgtcgacctctccggggtcaccccggggcacgcaggaccagcaggacgacacgccccgagcgggacggcgcgctccgcgcgcgacgccgcacggaggcaccgacgggtcccccg

SEQ ID NO: 18205 - RNA, 139 nt, unidentified
  source 1..139: mol_type = other RNA; note = Related to NZ_CP081964.1; note = Curtobacterium sp.
ggggaggcggccggcgcgcgtgacgcgtcgacctctccgggggcaccccggggcacgcaggaccagcaggacgacacgccccgagcaggcgagcgcgctccgcgcgcgacgctgcacggaggcaccgacaggtcctccg

SEQ ID NO: 18206 - RNA, 139 nt, unidentified
  source 1..139: mol_type = other RNA; note = Related to NZ_CP027869.1; note = Curtobacterium sp.
ggggaggcggccgacgcgcgcgacgcgtcgacctctccggggtcaccccgggacacgcaggaccagcacgacgacacgccccgagcgggagagcgcgctccgcgcgccacgccgcacggaggcaccgacgggtcccccg

SEQ ID NO: 18207 - RNA, 139 nt, unidentified
  source 1..139: mol_type = other RNA; note = Related to NZ_CP076544.1; note = Curtobacterium sp.
ggggaggcggacggcgcgcgcgacgcgtcgccctccccggggtcaccccggggcacgcaggaccagcaggaccacacgccccgagaggctcggcgcgctccgcgcgcgctccctcacggaggcaccgacaggtcccccg

SEQ ID NO: 18208 - RNA, 139 nt, unidentified
  source 1..139: mol_type = other RNA; note = Related to NZ_CP093378.1; note = Curtobacterium luteum
ggggaggcggatgacgcacgcggtgcgtcgtcctctccggggtcaccccggggtacgcaggaccagcaggacaccacgccccgagcgggcaggcgcgctccgcgcgcgacgccgcacggaggcaccgacgggtcccccg

SEQ ID NO: 18209 - RNA, 139 nt, unidentified
  source 1..139: mol_type = other RNA; note = Related to JAGGPH010000002.1; note = Curtobacterium sp.
ggggaggcggacggcgtacgtggtgcgtcgtcctctccggggcaaccccggggaacgcaggaacagctgacacacccgccccgagaggctcggcgcgctccgcgcgcgctccctcacggcagcaccgatcagtcccccg

SEQ ID NO: 18210 - RNA, 139 nt, unidentified
  source 1..139: mol_type = other RNA; note = Related to NZ_CP014513.1; note = Frondihabitans sp.
ggggaggcggacgacgctcgacgagcgccgtcctctccggggtcaccccgggggacgcagaacgaccagcagcacacgccccgagaggctcggcgcgcttcgcgcgctcgacctcacggacgcatcgacgggtcccccc

SEQ ID NO: 18211 - RNA, 139 nt, unidentified
  source 1..139: mol_type = other RNA; note = Related to QKTP01000001.1; note = Curtobacterium sp.
ggcgaggcggatggagcacgcgctgctgcatcctctccggggctcccccggggcacgcggatcgaccaggaacacacgcctcaggagctcgggcgcgctccgcgcgctgacgctcccgaacggcacgacgagtcgtccg

SEQ ID NO: 18212 - RNA, 139 nt, unidentified
  source 1..139: mol_type = other RNA; note = Related to NZ_LMNV01000002.1; note = Frondihabitans sp.
ggcgaggcgggcggcacacgagctgtgccgccctctccggggctaccccgggggacgaagatcgacgagaacacgacaccgcgagaggccgagcgcgcttcgcgcgccctgcctcccgcaccggcggatgagtcgttcg

SEQ ID NO: 18213 - RNA, 139 nt, unidentified
  source 1..139: mol_type = other RNA; note = Related to RJUO01000002.1; note = Frondihabitans sp.
gacgaggcggaccgcgttcgatgagcgcggttctctccggggctaccccgggggacgaggattgaccacgacatgacaccgcgagaggcgaagcgcgcttcgcgcaccctgcctcccgcaccggccgatgagtcgtccg

SEQ ID NO: 18214 - RNA, 139 nt, unidentified
  source 1..139: mol_type = other RNA; note = Related to NZ_UEXK01000004.1; note = Klenkia terrae
ctcgaggacgccgtgccgcaggtcgggccggcagctccggggatgccccggggaccgcacgcagcctccaccaccacgcctccggcgcgacgcagcgctccgcgcagctcagcgtcgggacgacgggaccggtcgaccc

SEQ ID NO: 18215 - RNA, 139 nt, unidentified
  source 1..139: mol_type = other RNA; note = Related to NZ_FMUH01000007.1; note = Klenkia marina
gtcgagggtgccgctccgcaggtcggcgcggcagctccggggatgccccggggaccgcacgcagcctccaccaccacgcctccggcgtgtcggtgcgctccgcgcacgcgtacgccgggacgacgggtcaggtcgaccc

SEQ ID NO: 18216 - RNA, 139 nt, unidentified
  source 1..139: mol_type = other RNA; note = Related to NZ_FNIR01000011.1; note = Klenkia soli
accgaggatgccgtgccgcgcgtcggtccggcagctccggggatgccccggggacagcacgcagcctccaccaccacgcctccggcgctcggcagcgctccgcgcagctccgcgtcgggacgacgggacaggtcggccc

SEQ ID NO: 18217 - RNA, 139 nt, unidentified
  source 1..139: mol_type = other RNA; note = Related to LMQC01000019.1; note = Modestobacter sp.
gtcgaggacgccgcaccgctggtcggtccggcagctccggggatgccccggggaccgcacgacgcctccaccacgacgcctccggcgccgcgctgcgctccgcgcagcagagcgccggtccgacgggacaggtcgaccc

SEQ ID NO: 18218 - RNA, 139 nt, unidentified
  source 1..139: mol_type = other RNA; note = Related to CP043652.1; note = Geodermatophilaceae bacterium NBWT11
gccgagggtgccggaccgcaggtcggaccggcagctccgggggtgccccggggaccgcagcacgccgccaccaccacgcctccggccacgcgctgcgctccgcgcagccgatggtcgggacgacgggacaggtcggccc

SEQ ID NO: 18219 - RNA, 139 nt, unidentified
  source 1..139: mol_type = other RNA; note = Related to NZ_JAABOZ010000008.1; note = Modestobacter sp.
gtcgaggtcgccggaccgctctgcggaccggcagctccggggcagccccgggcacggcagggagcctccaccaccacgacgcaggcgtgtcgctgcgctccgcgcaggtcaacgcccgcacgacgggactggccgaacc

SEQ ID NO: 18220 - RNA, 141 nt, unidentified
  source 1..141: mol_type = other RNA; note = Related to JACCXW010000487.1; note = Geodermatophilaceae bacterium
ggcgagaaacgcccggccgcttcggcggactggcagctccggggctaccccgggggccgcgtcacgacctcaccacggcaccgcaggcgcgccgctgcacggcaagcagctatgcgcccgcacgaccagacaggtcgcccg

SEQ ID NO: 18221 - RNA, 141 nt, unidentified
  source 1..141: mol_type = other RNA; note = Related to JACDAB010000197.1; note = Geodermatophilaceae bacterium
ggcgagaaacgcccggccgcttcggcggactggcagctccggggctaccccgggggccgcgtcacgacctcaccacggcaccgcaggcgcgccgctgcacgccaagcagctatgcgcccgcacgaccagacaggtcgcccg

SEQ ID NO: 18222 - RNA, 139 nt, unidentified
  source 1..139: mol_type = other RNA; note = Related to JABEMA010000014.1; note = Pseudokineococcus marinus
ggcgaggtcgccgacccgcgagccgggacggcgggtccggggctaccccgggcgctgcaggaggagatcgacaccccgccgcaggcaccgcgccgcgctccgcgcggccgggtgcccgcacgacgggacaggtcgtcgg

SEQ ID NO: 18223 - RNA, 138 nt, unidentified
  source 1..138: mol_type = other RNA; note = Related to NZ_QCXS01000003.1; note = Nakamurella deserti
ggcgagaacgccggccggcgacggcccggccgctccggggtacccccggggccggaacaccgcagcaagcacgaccgtgcaggcacgtcgtggcgctccgcgccaggttgtgcccgcccagcagggacaggtcgacca

SEQ ID NO: 18224 - RNA, 138 nt, unidentified
  source 1..138: mol_type = other RNA; note = Related to QXCQ01000133.1; note = Nakamurella silvestris
gacgagaacgccggtcggcaacgacccggcctctccggggtacccccggggtgcgatcaccgcagttggcaccaccatgcaggcagggcggtgcgctccgcgcacacacctgcccgcccagcagggacaggtcgtcca

SEQ ID NO: 18225 - RNA, 138 nt, unidentified
  source 1..138: mol_type = other RNA; note = Related to NC_013235.1; note = Nakamurella multipartita
ggcgagaactccggccggtgacggttcggacgctccggggcacccccggggtgggttcaccgcagttggcaccaccgagcaggcacatcgacgcgctccgcgcatgcaggtgcccgcccagcagggacaggtcgccca

SEQ ID NO: 18226 - RNA, 152 nt, unidentified
  source 1..152: mol_type = other RNA; note = Related to SZZH01000005.1; note = Nakamurella flava
gacgagaactccgatcgggaacggctcgtccgtccctgtcccggacgctccggggtacccccggggtgagcatgtcgcaccaggcacgaccgagcaggcccggcgctgcgctccgcgaaggagcgggcccgcccagcagcacaggtcgtcgt

SEQ ID NO: 18227 - RNA, 124 nt, unidentified
  source 1..124: mol_type = other RNA; note = Related to NZ_JAERWK010000005.1; note = Nakamurella leprariae
gccgggccgatgccggagcctccggggcaaccccggggccagcaggtcgagcaccgcagcgcaccgcaggccggacgacaggctccacctctgtcgcggcccgcacaggcgagcaggtcgtcgt

SEQ ID NO: 18228 - RNA, 150 nt, unidentified
  source 1..150: mol_type = other RNA; note = Related to NZ_JAERWL010000005.1; note = Nakamurella flavida
cacgagaacgtccgagtccccgggtccgcccggggccgggactctccggggtacccccggggtcgagcaggtcagctccaccagcacgccgcaggcaggcgcatggcgctccgcgccaggacctgcccgcacagcgacaccggtcgtgcg

SEQ ID NO: 18229 - RNA, 141 nt, unidentified
  source 1..141: mol_type = other RNA; note = Related to NZ_LT629799.1; note = Microlunatus sagamiharensis
ggcgagatcacgagcccgctccggcgggatcggtgcccgaggctccctcgggtagtagcaggtccacctcgcagcaggtccgcaggtgcgagaccgcgctccgcgcggctcggcacccgctcgtgcaggactggtcgtccg

SEQ ID NO: 18230 - RNA, 141 nt, unidentified
  source 1..141: mol_type = other RNA; note = Related to JACHZG010000001.1; note = Microlunatus antarcticus
ggcgagaacgcgaccccgctccggcgggatcggtgcccgaggctccctcgggtggcagcaggtcaaccccgcagcaggtcggcaggtgcgcgactgcgctccgcgcaggtcggcacccgctcgtgcaggactggtcgtccg

SEQ ID NO: 18231 - RNA, 139 nt, unidentified
  source 1..139: mol_type = other RNA; note = Related to AP012204.1; note = Microlunatus phosphovorus
cgcgagaatccgagccgcttcggcggatcggcgcccgaggctccctccggtgacagcacgttcaccctgccgcaggtccgcaggtgccccgctgcgcttcgcgcaggaacgcacccgctcaggcaagacaggtcgcccg

SEQ ID NO: 18232 - RNA, 155 nt, unidentified
  source 1..155: mol_type = other RNA; note = Related to NZ_LT629772.1; note = Microlunatus soli
agcgaggttccaccgcacagtgcgacaatcaacgatctgtcgtcgtgcggcgcccgaggaaccctcgggtgatggtgatcattccggccgacgatcgcaggcaacgcagcgggctccgcccgcctctttgcccgcagcacaggacaggtcgcagt

SEQ ID NO: 18233 - RNA, 139 nt, unidentified
  source 1..139: mol_type = other RNA; note = Related to NZ_BMMZ01000006.1; note = Microlunatus endophyticus
agcgaagattcaccgggcatcaacgatgtctggcgcccgaggcaccctcgggtgggagtgatccacggtgcagcacgatcgcaggccacgcggcgggctccgcccgcgtgctggcccgcacgacgcgacaggtcgcacg

SEQ ID NO: 18234 - RNA, 139 nt, unidentified
  source 1..139: mol_type = other RNA; note = Related to JADJPO010000003.1; note = Kineosporiaceae bacterium
gacgagatggccgacgcggcaacgcgtccggcgtcttcggggctaccccgaggtgggcacgacaaccagggcatcacggcgcaggtgccggacagcgctgcgcgctgttccgcacccgcaggacgagttcggtcggacg

SEQ ID NO: 18235 - RNA, 140 nt, unidentified
  source 1..140: mol_type = other RNA; note = Related to JAHBAY010000005.1; note = Kineosporia corallincola
ggcgagaactccggctggcctcgtccggacggtcgctccggggctaccccggggaaaccggcacgtcctcggcatcacgccgcacgtgccacgcagcgctccgcgctgctacgcacgcgcactgcacgacaggtcgcacc

SEQ ID NO: 18236 - RNA, 140 nt, unidentified
  source 1..140: mol_type = other RNA; note = Related to NZ_JAJOMB010000003.1; note = Kineosporia babensis
gacgagaacgccgtccggccggttccgggcggttgatccggggttaccccgggcacggcaccatatccacggcaccacgccgcacgtgcaccgcagcgctccgcgcagctcggcacgcgcacaaccggtcaggtcgttgc

SEQ ID NO: 18237 - RNA, 137 nt, unidentified
  source 1..137: mol_type = other RNA; note = Related to JAANNO010000010.1; note = Motilibacter aurantiacus
ggcgagaccgccggagcgcttcgcgccggccgctgcggggctcccccgtggcacggttcctctgttgggcaccacgtcgcatgcacgtctccacgctgcgcggaggcgagtgcacgcacggcgagacaggtcgccgc

SEQ ID NO: 18238 - RNA, 154 nt, unidentified
  source 1..154: mol_type = other RNA; note = Related to NZ_LT629710.1; note = Nakamurella panacisegetis
ggcgagactgctggttcgcctccgagtggtcagcggggccgatcagctgctccggggataccccggggccggttgtggtggtatcgcagcacgtcacaggcatgatgccgcgctccgcgcagggcaatgcccgtcaggcaggacaggtcgcctg

SEQ ID NO: 18239 - RNA, 159 nt, unidentified
  source 1..159: mol_type = other RNA; note = Related to NZ_CP060298.1; note = Nakamurella sp.
ggcgagactgctggttcgcctccgcgcagggatcggcggaggtcgaccggctgctccggggttaccccggggtaggtatcggtggtaccgcatcacgtcgcaggcacgcggttgcgctccgcgcaacgccgtgcccgccaggcggggacaggtcgcccg

SEQ ID NO: 18240 - RNA, 140 nt, unidentified
  source 1..140: mol_type = other RNA; note = Related to JAAALN010000029.1; note = Kineococcus siccus
ggcgagagggtcaggccggtgcgccggcccgaccggtccggggtcaccccgggcgcagcacgacgaccacggcgcggcgccgcaggaacccgcctgcgctccgcgcagctcagtacccgcacgacgggacgggtcgcccg

SEQ ID NO: 18241 - RNA, 140 nt, unidentified
  source 1..140: mol_type = other RNA; note = Related to JALDAT010000072.1; note = Paenibacillus sp.
ggcgagagggccgagccggtacgccggtgacgccgctccggggttcccccggggacagcacgacgaccacggcagggcgccgcagggacgtcgctgcgctgcgcgcaggacggtccccgcacgacgggacgggtcgcccg

SEQ ID NO: 18242 - RNA, 152 nt, unidentified
  source 1..152: mol_type = other RNA; note = Related to JACCBB010000001.1; note = Kineococcus aurantiacus
tgcgagagggccctcccggcgccggtgcaccggcggtggggcggcagctccggggtcaccccgggggcagcacgacacgttcggcaccacgccgcaggatcgaccgtgcgctgcgcgcactgcggatcccgcaccgcgggacaggtcgcccg

SEQ ID NO: 18243 - RNA, 148 nt, unidentified
  source 1..148: mol_type = other RNA; note = Related to JAFAOY010000834.1; note = Solirubrobacterales bacterium
accgaggtgggtgttggcgccttcgggcgctgagccctctccgggggtaccccggggacacctttgtgaccaggccagcgcatcgcgagccctcgcctgcgtccgtcggaagcagctcagggcacgcacgacgaagtgcagtcggcgc

SEQ ID NO: 18244 - RNA, 152 nt, unidentified
  source 1..152: mol_type = other RNA; note = Related to JAFARL010000184.1; note = Solirubrobacterales bacterium
accgaggtgggtcgacgcgcccctgtgggcgctgaaactctctccggggctaccccggggacaccggtgtgaccaggccagcgcatcgcgagccctcccctgcgtccggttggaagcagttctgggcacgcacgacgaagtgcagtcggcgc

SEQ ID NO: 18245 - RNA, 150 nt, unidentified
  source 1..150: mol_type = other RNA; note = Related to JACCUP010000282.1; note = Thermoleophilaceae bacterium
gccgaggcggaacggacgcgccttcgggtgcgtcctcctctccggggccaccccggggataccgaagtgagcagggcagcgcaccgcgggcccgctactgctcccatcacggggcaggtcggggcacgcacgacgtggagcggtcggcac

SEQ ID NO: 18246 - RNA, 150 nt, unidentified
  source 1..150: mol_type = other RNA; note = Related to JACCUX010000400.1; note = Solirubrobacterales bacterium
accgaggcgggtggacgcgccttcgggtgcgtctccctctccggggctaccccggggaaagcaggtctgaccgaagcagagcatcgcgagcccttcgctgcacccacaagggggcaggcgcgggcgcgcacggcacagagcggtcggcgg

SEQ ID NO: 18247 - RNA, 145 nt, unidentified
  source 1..145: mol_type = other RNA; note = Related to NZ_KI912613.1; note = Patulibacter minatonensis
cccgagacggcaccgcggatccctcgggatcacgggccgctccggggaacccccgggggcaccggtgatggccggacatcgcatcgcgtgcgctcgaccgccgctccgcgcgggggcgcgcacgcacgacgcaggaggtcgggcc

SEQ ID NO: 18248 - RNA, 142 nt, unidentified
  source 1..142: mol_type = other RNA; note = Related to NZ_AUKG01000002.1; note = Conexibacter woesei
cccgagccggtgcgcccgccctcgggcgggccacctctccggggtcaccccggggatcagcaggaaccacggcacggcagcgcgtgcgggctgcggcgacgagccgccatgccccgcacgcacgacacgggaccgtcgggcc

SEQ ID NO: 18249 - RNA, 146 nt, unidentified
  source 1..146: mol_type = other RNA; note = Related to JAEMSV010000041.1; note = Solirubrobacteraceae bacterium
cccgagccggtactgcgcatccccgtggtgcgcagcgccctccggggctcccccggggacgacctccacacctcagcaccacatcacgtgcgacctgccgctgcttcgccgcgggtctacgcacgtacgacgggagacgtcgggcc

SEQ ID NO: 18250 - RNA, 163 nt, unidentified
  source 1..163: mol_type = other RNA; note = Related to NZ_RBIL01000001.1; note = Solirubrobacter pauli
cccgagcccgcaccggacatgaagggtcagaccccttgtgttcgcgaggtgcgtctccggggttcccccggggagatcgaggtaccagaggcagtgcatcgcgtgtgcgcgggtgcgcccgtccggggcacgtctgcacacgcacgacaggagccgtcgggtg

SEQ ID NO: 18251 - RNA, 147 nt, unidentified
  source 1..147: mol_type = other RNA; note = Related to QHCD01000081.1; note = Pseudonocardiales bacterium
gtcgagagggtcgatgcgcgattccggtcgcccgtcgatcgctccggggaaaccccggggacgaacaagatccctcgcctccacatcacatgcgccgacgtgcgccacaacgcacccgcgcgcacgcacgatgagacaggtcgactc

SEQ ID NO: 18252 - RNA, 146 nt, unidentified
  source 1..146: mol_type = other RNA; note = Related to CADCTB010000222.1; note = Acidimicrobiales bacterium
cgcgagacctgtccggaccgccttcgggcgggaccggatcgctccggggttaccccggggtcatcgccttacctgggcatctcgtcgcatgcgcccgcgtccgctccacggacggcagcgcacacaccactgggactcgtcgcgtt

SEQ ID NO: 18253 - RNA, 135 nt, unidentified
  source 1..135: mol_type = other RNA; note = Related to JAFMRN010000002.1; note = Solirubrobacterales bacterium
tttgagttgggtcagcggaccctctctgggggttccccagggatcaccattcagtagggcaatgcgtcgcgcgtcctactttgtcgtgccccttcgtggcacctcgggacggcgcaggacaggagcagtcaagcc

SEQ ID NO: 18254 - RNA, 146 nt, unidentified
  source 1..146: mol_type = other RNA; note = Related to NZ_PPDK01000002.1; note = Euzebya tangerina
accgagatcggttgccggcccctcgcgggtctggtcaccaccttcggggaacccccgaggacacacgcgtcatctgacgctccatcgcatgcaggtgctgcacgcgttgcgtgcgagtctgcacacaccacgaagctggtcgggac

SEQ ID NO: 18255 - RNA, 144 nt, unidentified
  source 1..144: mol_type = other RNA; note = Related to NZ_JACXYY010000008.1; note = Nocardioides hwasunensis
ttcgagacggcggaccggtgcgtgtcaccggtcagcttccccggggctaccccggggaccaccggaatgttcgggcacggcaccgcgcgcgacaggctgcgctccgctgcaggtcgccgcgcgcacgacgggacaggtcgagct

SEQ ID NO: 18256 - RNA, 144 nt, unidentified
  source 1..144: mol_type = other RNA; note = Related to NZ_FNRT01000002.1; note = Nocardioides exalbidus
ttcgagacggctcaccggtgcgcgtcaccggtcagcttctccggggctaccccggggaccaccggaacgttcgggcactgcaccgcgcgcgacgcgctgtgcttcgctgcaggaggtcgcgcgcacgacgggacaggtcgggct

SEQ ID NO: 18257 - RNA, 144 nt, unidentified
  source 1..144: mol_type = other RNA; note = Related to NZ_JACJGN010000045.1; note = Nocardioides lijunqiniae
ctcgagacggcgaaccggtgcgtgacaccggcaagcctccccggggctaccccgggggccaccgacatgttcgggcacggcaccgcgcgcgcatcgctgcgctccgctgcaggtccgcgcgcgcacgacgggacaggtcgagca

SEQ ID NO: 18258 - RNA, 144 nt, unidentified
  source 1..144: mol_type = other RNA; note = Related to NZ_CP053660.1; note = Nocardioides sp.
ctcgagacggcgaaccggtgcatgacaccggtctgcctccccggggataccccgggggccaccggcatgttcgggcacagcaccgcgcgcgactcgctgcgcttcgctgcaggtcttcgcgcgcacgacgggactggtcgagca

SEQ ID NO: 18259 - RNA, 144 nt, unidentified
  source 1..144: mol_type = other RNA; note = Related to NZ_JAFBCA010000001.1; note = Nocardioides cavernae
ctcgagacggcggaccggtgcgcgtcaccggtcggcttctccggggctaccccggggaccaccggatcgttcgggcacggcaccgcgcgcgactcgctgcgctccgctgcaggtcatcgcgcgcacgacgggacaggtcgggct

SEQ ID NO: 18260 - RNA, 144 nt, unidentified
  source 1..144: mol_type = other RNA; note = Related to NZ_CP022296.1; note = Nocardioides sp.
ctcgagacggcggaccggtgcgcgtcaccggtttgcttctccggggctaccccggggaccaccggtacgtccgggctcagcaccgcgcgcgactcgctgcgctccgctgcaggtcatcgcgcgcacgacgggacaggtcgggcc

SEQ ID NO: 18261 - RNA, 144 nt, unidentified
  source 1..144: mol_type = other RNA; note = Related to JABJQY010000002.1; note = Nocardioides sp.
ctcgagacggcggaccggtgcgcgtcaccggtcggcctccccggggataccccggggaccaccggtacgtccgggcacggcaccgcgcgcggctcgctgcgctccgctgcaggccaccgcgcgcacgacgggacaggtcgagca

SEQ ID NO: 18262 - RNA, 144 nt, unidentified
  source 1..144: mol_type = other RNA; note = Related to NZ_CP087710.1; note = Nocardioides sp.
ctcgagacggcggaccggtgcgcgtcatcggtcggcctccccggggctaccccggggaccaccggtacgtccgggctcagcaccgcgcgcgacgcgctgcgcttcgctgcaggagatcgcgcgcacgacgggacaggtcgaggc

SEQ ID NO: 18263 - RNA, 144 nt, unidentified
  source 1..144: mol_type = other RNA; note = Related to JAKJHZ010000001.1; note = Nocardioides sp.
ctcgagacggcggaccggtgcgcgtcaccggcccacctctccggggataccccgggggccaccggaacgttcgggcacggcaccgcgcgcgaagcgctgcgctccgctgcaggagatcgcgcgcacgacgggacaggtcgagca

SEQ ID NO: 18264 - RNA, 144 nt, unidentified
  source 1..144: mol_type = other RNA; note = Related to FOKC01000001.1; note = Nocardioides alpinus
ctcgagacggtgaaccggtgcgcgtcaccggttcgcttctccggggctaccccggggaccaccggaacgttcgggcactgcaccgcgcgcgactcgctgcgctccgctgcaggtcatcgcgcgcacgacgggacaggtcgagct

SEQ ID NO: 18265 - RNA, 144 nt, unidentified
  source 1..144: mol_type = other RNA; note = Related to NZ_JZDQ02000022.1; note = Nocardioides luteus
ctcgagacggcgagccggtgcgtgacaccggtcagcctccccggggctaccccgggggccaccggtacatccgggcacggcaccgcgcgcgacaggctgcgctccgctgcaggtcgccgcgcgcacgacgagacaggtcgagga

SEQ ID NO: 18266 - RNA, 144 nt, unidentified
  source 1..144: mol_type = other RNA; note = Related to FMZM01000021.1; note = Nocardioides lianchengensis
ctcgagacggccgaccggtgtgcgtcaccggccagcctccccggggctaccccggggaccaccggaacgttcgggcacggcaccgcgcgcgactcgctgcgctccgctgcaggtcttcgcgcgcacgacgggacaggtcgagca

SEQ ID NO: 18267 - RNA, 144 nt, unidentified
  source 1..144: mol_type = other RNA; note = Related to JAFBBZ010000001.1; note = Nocardioides salarius
ctcgagacggtgagctggcgcgcgacgtcggtccacctccccggggctaccccgggggccaccggtacgtccgggcaccgcaccgcgcgcgagacgctgcgctccgctgcaggtcctcgcgcgcacgacgggacaggtcgggca

SEQ ID NO: 18268 - RNA, 144 nt, unidentified
  source 1..144: mol_type = other RNA; note = Related to NZ_CP075371.1; note = Nocardioides aquaticus
cttgagacggtgagccggtgcgcgacaccggaccacctccccggggctaccccgggggtcaccggaacgttcgggcaccgcaccgcgcgcgagacgctgcgctccgctgcaggaagtcgcgcgcacgacgagacaggtcgagca

SEQ ID NO: 18269 - RNA, 144 nt, unidentified
  source 1..144: mol_type = other RNA; note = Related to NZ_JADCLL010000001.1; note = Nocardioides kribbensis
ctcgagacggtggaccggtgcgtgacaccggcccgcctccccggggctaccccggggaccaccggcacgtccgggcacggcaccgcgcgcgagtcgctgcgctccgctgcaggaccccgcgcgcacgacgggacaggtcgagcc

SEQ ID NO: 18270 - RNA, 144 nt, unidentified
  source 1..144: mol_type = other RNA; note = Related to NZ_VDMR01000001.1; note = Nocardioides litoris
ctcgagacggttggccgacgcgcgtcgtcggtccacctccccggggctaccccgggggccaccggcacgtccgggcacggcaccgcgcgcgacacgctgcgctccgcggcaggaagccgcgcgcacgacgggacaggtcgagcg

SEQ ID NO: 18271 - RNA, 144 nt, unidentified
  source 1..144: mol_type = other RNA; note = Related to JAAGXA010000003.1; note = Nocardioides zeae
ctcgagacggtcaaccggtgcgcgtcaccggtcgacctccccggggctaccccggggaccaccggcacgtccgggcactccaccgcgcgcggctcgctgcgctccgctgcaggtctccgcgcgcacgacgggacaggtcgaggg

SEQ ID NO: 18272 - RNA, 144 nt, unidentified
  source 1..144: mol_type = other RNA; note = Related to NZ_SZVU01000003.1; note = Nocardioides dongxiaopingii
ctcgagacggtgacctggcgcgagtcgccagttcacctccccggggctaccccgggggccaccggtacgtccgggcactgcaccgcgcgcgcctcgctgcgctccgctgcaggtccgcgcgcgcacgacgggacaggtcgagca

SEQ ID NO: 18273 - RNA, 144 nt, unidentified
  source 1..144: mol_type = other RNA; note = Related to NZ_PVUE01000003.1; note = Antricoccus suffuscus
ttcgagaatgtcgatcggcgtacgacgtcgaacgacgtccccggggctaccccggggtcaaccggcatggccgggcacctcaccacgcgcgaggcactgcgcttcgcggcagctagtcgcgcgcacgacaggaatggtcgagcg

SEQ ID NO: 18274 - RNA, 144 nt, unidentified
  source 1..144: mol_type = other RNA; note = Related to NZ_VCQV01000003.1; note = Leekyejoonella antrihumi
ttcgagacgggtgaccggcgcgcagcgtcggttcacctctccggggttaccccgggggttaccggtacgtccgggcactgcaccgcgcgcgagcggctgcgcttcgcggcaggaagtcgcgcgcacgacaggacaggtcgaaca

SEQ ID NO: 18275 - RNA, 145 nt, unidentified
  source 1..145: mol_type = other RNA; note = Related to NZ_KB905425.1; note = Sciscionella marina
ctcgagaacggtcggcaggggcgtgacctcgctcgaccactcaggggttccccctgggatcaccggcagggtccggcagcgcaccgcgcgcgagccaccgcggaacgccgcagacattcgcgcgcacgacgtggttggtcgagtc

SEQ ID NO: 18276 - RNA, 132 nt, unidentified
  source 1..132: mol_type = other RNA; note = Related to NZ_QGTX01000001.1; note = Geodermatophilus normandii
ggcaggacgaccggcagcgaccggtctcccggggcgaccccggggcagcaggtcatcgccaccatcggcaccacccgccggacggcgcgctccgcgcacgcaccggcgactcccacgcggagtggctgcccg

SEQ ID NO: 18277 - RNA, 132 nt, unidentified
  source 1..132: mol_type = other RNA; note = Related to NZ_JABGCI010000002.1; note = Blastococcus endophyticus
ggcaggacgaccggcgagtccggtccctccggggcaaccccggggcagcacgtgtcagccaggcgcagcgtcacccgccggacggcgcgctccgcgcacgtcccggcgcctccctcagggagtggctgcccg

SEQ ID NO: 18278 - RNA, 132 nt, unidentified
  source 1..132: mol_type = other RNA; note = Related to NZ_SPQN01000061.1; note = Geodermatophilus sp.
ggcaggacgatcggcgtcagccggtctccccggggcaaccccggggcaacgcagcgagtcgggcatcgcgtcacccgccagcaggcgcgctccgcgcacgccctggcgactccctcagggggcggctgcctc

SEQ ID NO: 18279 - RNA, 132 nt, unidentified
  source 1..132: mol_type = other RNA; note = Related to FRDM01000010.1; note = Geodermatophilus obscurus
gtcgggacgaccggcgtcagccggtctccccggggctaccccggggcagcgcagcgagcagggcacggcgtcagccgccaccaggagcgctccgcgcacgacctggcgactccctcagggagcggctgcctc

SEQ ID NO: 18280 - RNA, 132 nt, unidentified
  source 1..132: mol_type = other RNA; note = Related to NZ_VFQE01000001.1; note = Blastococcus colisei
ggcaggacgaccggtgaggaccggttctcccggggaaaccccggggatcgcactgttcccgaacatctcgtcaaccgccaggccgtgcgctccgcgcacctgatggcgcctcgttcaggggccggctgcccg

SEQ ID NO: 18281 - RNA, 132 nt, unidentified
  source 1..132: mol_type = other RNA; note = Related to FOND01000013.1; note = Blastococcus sp.
ggcaggacgaccggtgaggaccggttctcccggggcaaccccggggatcgcactgttcccgagcatctcgtcaaccgccaggccgtgcgctccgcgcacctgatggcgcctcgatcaggggctggctgcccg

SEQ ID NO: 18282 - RNA, 132 nt, unidentified
  source 1..132: mol_type = other RNA; note = Related to NZ_VLKF01000001.1; note = Modestobacter roseus
ggcaggacgaccggcgtggaccggtcaccccggggcaaccccgggggtcgtgttcggacccagcatctcgtcacccgcccggccgtgcgctccgcgcacctggtggcgcctcgatcaggggctggctggccg

SEQ ID NO: 18283 - RNA, 133 nt, unidentified
  source 1..133: mol_type = other RNA; note = Related to NZ_JPMX01000077.1; note = Modestobacter caceresii
ggcaggacgaccggcagcagccggtcaccccggggcaaccccggggcatcgtgagcaggtcgggcatcgcgtcatgagccgcgctgtgcgctccgcgcaccaggcggcgcctccagcgaggagcggctggccg

SEQ ID NO: 18284 - RNA, 133 nt, unidentified
  source 1..133: mol_type = other RNA; note = Related to NZ_SJEX01000063.1; note = Modestobacter excelsi
ggcaggacgaccggcacgagccggtccccccatggcaaccccggggcatcgtgagaagcccaggcacggcgtcatgagccggacggcgcgctccgcgcacgcaacggcacatcgcccagggacgggctggtct

SEQ ID NO: 18285 - RNA, 133 nt, unidentified
  source 1..133: mol_type = other RNA; note = Related to JAAGWH010000033.1; note = Modestobacter muralis
gccaggacgaccggcagcgtccggtcaccccggggcaaccccggggacccgtgaagaggtcaggcacagcgtcatgagccatgccgtgcgctccgcgcacccagtggcacgtcccccagggactggctggtct

SEQ ID NO: 18286 - RNA, 134 nt, unidentified
  source 1..134: mol_type = other RNA; note = Related to NZ_VNHW01000003.1; note = Blastococcus xanthinilyticus
ggcaggacgaccggcgaggagccggtccctccggggctaccccggggtctcgcagcagagctgggcgatgcgccacccgccggacggcgcgctccgcgcacgtcccggcacctccgtcagggagcggctgccct

SEQ ID NO: 18287 - RNA, 133 nt, unidentified
  source 1..133: mol_type = other RNA; note = Related to QHCB01000177.1; note = Pseudonocardiales bacterium
ggcaggttggtcgggaccacccgatcactccggggcaaccccggggtcatcactcgacgcaggccatcgcgtcgcacgcccgctactgcgccctacgcaagcctgggcgcgcacggcagggattggctgcctc

SEQ ID NO: 18288 - RNA, 133 nt, unidentified
  source 1..133: mol_type = other RNA; note = Related to JAFKEJ010000505.1; note = Actinomycetia bacterium
ggcaggacggtcgggctcgctcgaccactccggggcaaccccggggtcatcgaccggcaccacgcatcgcatcgcccgccacgaagttcacctcgtgaacgagccggcgggcacatcggaggttggctggccg

SEQ ID NO: 18289 - RNA, 132 nt, unidentified
  source 1..132: mol_type = other RNA; note = Related to NZ_FQVU01000005.1; note = Jatrophihabitans endophyticus
ggcaggacgatcgggtgcaccgatctctccggggcaaccccgggggcgcaaccgcacgcgaggcactgcgtcgcgagccagggcctgcactgcgtgcagcggcaggcacgcacgacagcgaagggctaccgc

SEQ ID NO: 18290 - RNA, 135 nt, unidentified
  source 1..135: mol_type = other RNA; note = Related to BOMC01000025.1; note = Actinoplanes abujensis
cctgagctggccgtcgcacgacgacggctcttcggggcaaccccgagggagttcgcttgaccaccacagcgcatcgccggcgcgccgcagcgcttcgcgcagggcggcgcaggcacgaccgggattcgtcggggc

SEQ ID NO: 18291 - RNA, 147 nt, unidentified
  source 1..147: mol_type = other RNA; note = Related to JAHKKG010000005.1; note = Actinoplanes bogorensis
cccgagctggccgtcgcccgccggaaacggcggcgagggtctcttcggggtaaccccgagggcgtccagtgatcaccgcagcgcatcgccggcgcgcctcagcgcttcgcgcagcacggcgcaggcacgaccgggcttcgtcgggac

SEQ ID NO: 18292 - RNA, 147 nt, unidentified
  source 1..147: mol_type = other RNA; note = Related to NZ_JAHWFK010000003.1; note = Actinoplanes sp.
cctgagctggccgtcgaccgccgttcgcggcggcgagggctcttcggggcaaccccgaggacgcttgattgagcaccgcagcgcatcgccggcgcgacgcagcgcttcgcgcggcactgcgcaggcacgaccgggaatcgtcagggc

SEQ ID NO: 18293 - RNA, 148 nt, unidentified
  source 1..148: mol_type = other RNA; note = Related to NZ_OBDY01000014.1; note = Actinoplanes atraurantiacus
cccgagctcgaccgtcgcccgtcgttccggcggcgagggtctctccggggtaaccccggggaagcttgagtgaccaccgcagcgcatcgccggcgcgcctccgcgcttcgcgcagcccggcgcaggcacgaccgggaatcgtcggggc

SEQ ID NO: 18294 - RNA, 147 nt, unidentified
  source 1..147: mol_type = other RNA; note = Related to AP023356.1; note = Actinoplanes ianthinogenes
cccgagctggccgtcgcacgccgttcccggcggcgagggctcttcggggtaaccccgaggacgcaggattgactaccgcagcgcatcgccggcgcgcgtcagcgcttcgcgcagcacggcgcaggcacgaccgggcatcgtcggggc

SEQ ID NO: 18295 - RNA, 149 nt, unidentified
  source 1..149: mol_type = other RNA; note = Related to NZ_JOJL01000057.1; note = Actinoplanes sp.
cccgagctggcgctcgcccgtcgcttcgcggcggcgagggtctcttcggggtaaccccgaggaagcttgattgactaccgcagcgcatcgccggcgcgcttcagcgcttcgcgcagcacggcgcaggcacgaccgggattcgtcgggac

SEQ ID NO: 18296 - RNA, 135 nt, unidentified
  source 1..135: mol_type = other RNA; note = Related to NZ_BOMY01000054.1; note = Actinoplanes tereljensis
cccgagctggccgccgcactccggtggctcttcggggtaaccccgaggaagcaggtttgactaccgcaccgcatcgccggcgcacgtccgcgcttcgcgcggctcggcgcaggcacgaccgggaatcgtcggggc

SEQ ID NO: 18297 - RNA, 147 nt, unidentified
  source 1..147: mol_type = other RNA; note = Related to NZ_RJAC01000023.1; note = Actinoplanes sp.
cccgagctcgccgtcggccgtcgttcgcggcggcgatggctcttcggggtaaccccgaggacgtttctgtgagcaccgcagcacaccgccggcgcgcttccgcgcttcgcgcagtccggcgcaggcacgaccgggaatcgtcggggc

SEQ ID NO: 18298 - RNA, 147 nt, unidentified
  source 1..147: mol_type = other RNA; note = Related to JAENHP010000015.1; note = Actinoplanes ovalisporus
cccgagctggccgtcgtccgccgtgagcggcggcgagggctcttcggggtaaccccgaggaagcaggattgaccaccgcagcgcatcgccggcgcgccgcagcgcttcgcgctggacagcgcaggcacgaccgggaatcgtcggggc

SEQ ID NO: 18299 - RNA, 150 nt, unidentified
  source 1..150: mol_type = other RNA; note = Related to NZ_QHHV01000069.1; note = Actinoplanes sp.
cccgagctgaccgtcgcgcgccgtccgcggcgcgccgagggtctcttcggggtaaccccgagggcgcaggattgatcaccgcagcgcatcgccggcgcgcccctgcgctccgcgcaggacggcgcaggcacgaccgggcatcgtcggggc

SEQ ID NO: 18300 - RNA, 150 nt, unidentified
  source 1..150: mol_type = other RNA; note = Related to BOQL01000058.1; note = Actinoplanes auranticolor
cccgagctgaccgtcgcgcgccgcccgcggcgcgacgagggtttcttcggggtaaccccgagggcgcaggattgaccaccgcagcgcatcgccggcgcgcctctgcgcttcgcgcagctcggcgcaggcacgaccgggcatcgtcggggc

SEQ ID NO: 18301 - RNA, 128 nt, unidentified
  source 1..128: mol_type = other RNA; note = Related to NC_022657.1; note = Actinoplanes friuliensis
cccgagctgaccctcacgggtctctccggggtaaccccggggcgaacaggtgactaccgcagcgcatcgccggcgcctcgccgcgcttcgcgcgagaacgcgcaggcacgaccgggtttcgtcggggc

SEQ ID NO: 18302 - RNA, 137 nt, unidentified
  source 1..137: mol_type = other RNA; note = Related to NZ_RJKL01000001.1; note = Couchioplanes caeruleus
cccgagctggccgccggtccgccgacggcctctccggggtacccccgggggcgagagattgagccacgcagcgcatcgccggcgcgccgccgcgctccgcgcgggacagcgcaggcacgaccgggcaacgtcggggc

SEQ ID NO: 18303 - RNA, 139 nt, unidentified
  source 1..139: mol_type = other RNA; note = Related to CP005929.1; note = Actinoplanes sp.
ggcgagccggccgccggtacaccgacggtctctccggggcacccccgggggcgcacatccttcgctgggcagcacaccgccggcacgtcattcgcgctccgcgcgagccggtgcgggcacgaccaggcatcgtcggccc

SEQ ID NO: 18304 - RNA, 135 nt, unidentified
  source 1..135: mol_type = other RNA; note = Related to NZ_LOJP01000001.1; note = Actinoplanes sp.
cccgagctgaccgtcgcttcggcgaggtctctccggggcacccccggggacgaaagtgtgagttcgcaccgcaccgccggcactcgcccgcgcttcgcgcgacaccgtgcaggcacaaccgggattcgtcgggac

SEQ ID NO: 18305 - RNA, 138 nt, unidentified
  source 1..138: mol_type = other RNA; note = Related to NZ_BOMN01000001.1; note = Actinoplanes humidus
cccgagcttgaccgccggtccgccgacggtctctccggggcaaccccgggggcgacatgatcagccaggcacagcaccgccggcgtgcccccgcgctccgcgcggcacgacgcaggcacaaccgggcatcgtcgggcc

SEQ ID NO: 18306 - RNA, 150 nt, unidentified
  source 1..150: mol_type = other RNA; note = Related to NZ_BOPH01000102.1; note = Virgisporangium ochraceum
cccgagctggccggagcgcgtcgtccgcggcgcgccgacggcctcttcggggcaaccccgaggacgacgcagtgagcaccgcagcgcatcgccggcgcgcatccgcgctccgcgcaggacggcgcaggcacgacggggcatcgtcgggac

SEQ ID NO: 18307 - RNA, 150 nt, unidentified
  source 1..150: mol_type = other RNA; note = Related to NZ_BOPG01000148.1; note = Virgisporangium aurantiacum
cccgagctggccggagcgcgccgttcacggcgtgccgacggcctcttcggggcaaccccgaggacgacgcagtgagcacggcagcgcatcgccggcgcgcaccagcgcttcgcgcaggacagcgcaggcacgacggggcatcgtcgggac

SEQ ID NO: 18308 - RNA, 138 nt, unidentified
  source 1..138: mol_type = other RNA; note = Related to NZ_JADMLH010000017.1; note = Pseudosporangium sp.
cccgagcaggccgccggatcgccgacggtctctccggggcacccccgggggcgagcacattgagccacgcagcgcttcgccggcgcgccaccgcgctccgcgcgagacagcgcaggcacgaccgggcatcgtcggggc

SEQ ID NO: 18309 - RNA, 129 nt, unidentified
  source 1..129: mol_type = other RNA; note = Related to NZ_JNYJ01000032.1; note = Dactylosporangium aurantiacum
cccgagcagaccagcgatggtcgctccggggtaaccccggggacgcaggattgagcacggcagcacatcgccggcgcgcctccgcgcttcgcgcgactctgcgcaggcacgaccgggattcgtcggggc

SEQ ID NO: 18310 - RNA, 135 nt, unidentified
  source 1..135: mol_type = other RNA; note = Related to NZ_CP061913.1; note = Dactylosporangium vinaceum
cccgagctgatcgcggctcgccgtgatcgctccggggcaaccccgggggcgcagtgatgagcaccgcagcacaccgccggccctcagccgcacttcgtgcgacaccgggcaggcacgaccgggcaacgtcggggc

SEQ ID NO: 18311 - RNA, 135 nt, unidentified
  source 1..135: mol_type = other RNA; note = Related to NZ_BMPI01000004.1; note = Dactylosporangium sucinum
cccgagccggccaggggcgaccttggcctctccgggggaaccccggggacgcaggattgagcaccgcacagcaccgccggcccgacgccgcgctccgcgcaggccagggcaggcacgaccgggtgtcgtcggggc

SEQ ID NO: 18312 - RNA, 153 nt, unidentified
  source 1..153: mol_type = other RNA; note = Related to NZ_JAGGJO010000001.1; note = Micromonospora sp.
cccgagctgaccaggccggccccccacgtggggtccggtcatggtctctccggggcaaccccggggacggactactcacctcggcaccacaccacaggtgcgtcggcacgctccgcgagcctgtgcacccgcacgaccgggcatcgtcgggac

SEQ ID NO: 18313 - RNA, 153 nt, unidentified
  source 1..153: mol_type = other RNA; note = Related to VDFY01000230.1; note = Micromonospora orduensis
cccgagctgaccaggccgctcccccacgtggagtccggtcacggtctctccggggcaaccccggggacgcgatactcacctcggcaccacaccacaggtgcgtcggcacgctccgcgagcctgtgcacccgtacgaccgggcatcgtcgggac

SEQ ID NO: 18314 - RNA, 153 nt, unidentified
  source 1..153: mol_type = other RNA; note = Related to NZ_RAQQ01000031.1; note = Micromonospora globbae
cccgagctggccaggctgcgtccccgcgtggggcgcggtcacggtctctccggggtaaccccggggacgtcacactcacctcggcaccacaccacaggtgcgtcggcacgctccgcgagcctgggcacccgcacgaccgggcatcgtcgggac

SEQ ID NO: 18315 - RNA, 153 nt, unidentified
  source 1..153: mol_type = other RNA; note = Related to POTY01000051.1; note = Micromonospora craterilacus
cccgagctgaccaggccgctcccccaggcggggcgcggtcacggtctctccggggcaaccccggggacgcaacactcacccaggcaccacaccacaggtgcgtcggcacgctccgcgagcctgtgcacccgcacggccgggcatcgtcgggac

SEQ ID NO: 18316 - RNA, 153 nt, unidentified
  source 1..153: mol_type = other RNA; note = Related to NZ_QUMQ01000001.1; note = Asanoa ferruginea
cccgagctgaccgtgccgcgtctccgctggaggcggggcgatggtctctccggggcaaccccgggggcgtgttgtctacctgagcaccacaccgcaggtgcgcgggcacgcttcgcgaacctctgcacccgcacgaccgggcatcgtcggggc

SEQ ID NO: 18317 - RNA, 141 nt, unidentified
  source 1..141: mol_type = other RNA; note = Related to NZ_BONC01000044.1; note = Asanoa iriomotensis
cccgagccgaccgtgccgcgcgtcggccacggtctctccggggcaaccccgggggcgtgtcacctacctgagcaccacaccgcaggtgcgccagcacgcttcgcgagcctctgcacccgcacgaccgggcatcgtcgggac

SEQ ID NO: 18318 - RNA, 153 nt, unidentified
  source 1..153: mol_type = other RNA; note = Related to NZ_LT607412.1; note = Micromonospora coriariae
cccgagctgacctggccgcgcccccaccggggacgcggtcggagtctctccggggcaaccccgggggcggcacatccacctgggcaccacaccacaggtgcgtcggcacgctccgcgagcctgtgcacccgtacgaccgggattcgtcggggc

SEQ ID NO: 18319 - RNA, 144 nt, unidentified
  source 1..144: mol_type = other RNA; note = Related to NZ_AP023359.1; note = Polymorphospora rubra
cccgagctgaccaggccgcgtccgcgcggtcccggtctctccggggaaaccccggggacgtcacccgtaccaccgcatcgcgtcgcctgcgctccggtgcgctccgcgcacgtccgcgcacgcacgaccgggcctcgtcgggac

SEQ ID NO: 18320 - RNA, 151 nt, unidentified
  source 1..151: mol_type = other RNA; note = Related to JADGGF010000365.1; note = Micromonosporaceae bacterium
cccgagctgaccaggacgccgtcctcggcgacggcccaccggtctctccggggtaaccccgggggcgtcacaggtatctccccgcggcaccacatgcgcgacccggcgcttcacgccgcacggcgcacgtacgacagggaaccgtcggggc

SEQ ID NO: 18321 - RNA, 143 nt, unidentified
  source 1..143: mol_type = other RNA; note = Related to JAHBSN010000079.1; note = Actinomycetia bacterium
accgagtcggtcggatggagcttcggcgtcgtccgacctctccggggcacccccggggacgaccacgtggtcacacatcgcatcgccggcgcgctcgcgcactccgtgcgcccaggcgccagcacgacaggacgggtcgggag

SEQ ID NO: 18322 - RNA, 134 nt, unidentified
  source 1..134: mol_type = other RNA; note = Related to JAFAZI010000149.1; note = Frankiaceae bacterium
tacgagctcgtcgaggtcgcactcgaccgccccggggctaccccggggttgattcgtcatgtcaggcattccttcgcacgtgcggcggcgcactccgtgcacgcaagcacgcgcacggcaggactggtcggacg

SEQ ID NO: 18323 - RNA, 133 nt, unidentified
  source 1..133: mol_type = other RNA; note = Related to JACGZW010000002.1; note = Amycolatopsis dendrobii
ggtgagccggtggaggaccacccactccggggcaaccccggggagcagcacgacacgtacccacagcgccccgcgcagcggcggcacgctccgcgtgcgagacagcgcggatgaacggagaacgagtcgcctc

SEQ ID NO: 18324 - RNA, 133 nt, unidentified
  source 1..133: mol_type = other RNA; note = Related to NZ_PDJK01000002.1; note = Amycolatopsis sulphurea
ggtgagccggtggaacaccacccactccggggcaaccccggggagcagtacggcacgcaaacaccgcaccccacgcgaacgcggcacgctccgcgtacaagaccgcgcggatgaacggagaaagagtcacctc

SEQ ID NO: 18325 - RNA, 134 nt, unidentified
  source 1..134: mol_type = other RNA; note = Related to NZ_CP080519.1; note = Amycolatopsis sp.
ggtgagcccggtggagaaccaccccttccggggcaaccccggaacgcaccacatcacccgatcacagcgccccacgcgagggcggcacgctgcgcgtacaagaccgcgcggatgaacggagaaagagtcacccc

SEQ ID NO: 18326 - RNA, 134 nt, unidentified
  source 1..134: mol_type = other RNA; note = Related to NZ_FOEF01000001.1; note = Amycolatopsis saalfeldensis
ggtgagcccggtggagaaccaccctctccggggttaccccggggtgcacgaggacacgcaggcacagcgccccgcgcgaacgcggcacgctccgcgtacaggaccgcgcggatgaacggagaatcagtcacctc

SEQ ID NO: 18327 - RNA, 133 nt, unidentified
  source 1..133: mol_type = other RNA; note = Related to NC_021252.1; note = Amycolatopsis keratiniphila
ggtgagccggtggatcaccacccactccggggcaaccccggggagtacgaagtcagccaggcaaggcgccccgcgcgagcgcggcatgcttcgcgtacgagtccgcgcggatgacaggagaaagagtcacccc

SEQ ID NO: 18328 - RNA, 133 nt, unidentified
  source 1..133: mol_type = other RNA; note = Related to NZ_ARVW01000001.1; note = Amycolatopsis nigrescens
ggtgagcaggtggaacaccacccactccggggcaaccccggggagcacgaggacacgcaggcatcgcgccccgcgcgaacgcggcacgcttcgcgtacaagaccgcgcggatgaacggagaaaaggtcacctc

SEQ ID NO: 18329 - RNA, 137 nt, unidentified
  source 1..137: mol_type = other RNA; note = Related to NZ_FNON01000006.1; note = Amycolatopsis xylanica
gatgagcaaggtggagcgatccgcccgctccggggcaaccccggggcgcaccatggcacccgcgcacggcaccccacgccgatggggcacgctccgcggacgacgcggcgcggtcgaacggagaacgaggtcatctc

SEQ ID NO: 18330 - RNA, 133 nt, unidentified
  source 1..133: mol_type = other RNA; note = Related to CP090063.1; note = Amycolatopsis acidiphila
ggtgagcaggtggatcaccaccccctccggggcaaccccggggagcttcaggacacgcaggtatggcgccccacgcgaacgcggcacgcttcgcgtacagaaccgcgcggatgaacggagaaaaggtcacctc

SEQ ID NO: 18331 - RNA, 135 nt, unidentified
  source 1..135: mol_type = other RNA; note = Related to NZ_NKYE01000001.1; note = Amycolatopsis antarctica
ggtgagcaggtgggagttcccgcccgctccggggcaaccccggggagatcgaccagaggtaggcatcgcgccccacgcgcgcgagcatgctccgcgtacctgatgcgcgcggagacacggagaaaaggtcacccc

SEQ ID NO: 18332 - RNA, 135 nt, unidentified
  source 1..135: mol_type = other RNA; note = Related to NZ_JAENJH010000016.1; note = Prauserella cavernicola
ggtgagcaggtgggaggacccacccactccggggcaaccccggggagctcgacatcggatgacgatcgcgccccacgcgcgtacgcatgctccgcgtggctccggcgcgaggacgaacggagatgcggtcacctc

SEQ ID NO: 18333 - RNA, 135 nt, unidentified
  source 1..135: mol_type = other RNA; note = Related to NZ_MASU01000002.1; note = Prauserella flavalba
ggtgagcaggtgggacgacccacccactccggggcaaccccggggagctcgacatcggcagggcaccgcgccccacgcgcgcccgcatgctccgcgtggcccaagcgcgcggacgaacggagacgaggtcacctc

SEQ ID NO: 18334 - RNA, 135 nt, unidentified
  source 1..135: mol_type = other RNA; note = Related to VIVS01000002.1; note = Prauserella muralis
ggtgagcaggtggggtcacccacccactccggggcaaccccggggagcccggcatcggttgagcactgcgccccacgcgcggcgccatgctccgcgtgcgatcggcgcgcgggagagcggagacgaggtcacctc

SEQ ID NO: 18335 - RNA, 140 nt, unidentified
  source 1..140: mol_type = other RNA; note = Related to NZ_CP059997.1; note = Amycolatopsis sp.
ggtgagcagatggggacacccatccctccggggcaaccccggggagcacgaccacgctgaggcacggcgccccacgcgcgtgtgcacgctgcgcgtacctgttgggagcgcgcggacggccacgggagaaaggtcacctc

SEQ ID NO: 18336 - RNA, 141 nt, unidentified
  source 1..141: mol_type = other RNA; note = Related to NZ_VTHK01000003.1; note = Amycolatopsis anabasis
ggtgagcaggcggggtcacctgcccactccggggcaaccccggggagcacgacgaaacccaggcatcgcgccccacgcgcgacagcacgctccgcgtacgccttggtgcgcgcggcagaacaggggagaaacggtcacctc

SEQ ID NO: 18337 - RNA, 144 nt, unidentified
  source 1..144: mol_type = other RNA; note = Related to NZ_JACHMH010000001.1; note = Crossiella cryophila
agcgagacgaggggtggcccagtgctcgcccttccctccggggataccccggggagcagtgtttcagctggtcagtgcgccccgcgtggatcggcacgctccgcgtgcgagccccacgcggctcacgatggcagaggtcgcccc

SEQ ID NO: 18338 - RNA, 135 nt, unidentified
  source 1..135: mol_type = other RNA; note = Related to NZ_RBXR01000001.1; note = Saccharothrix variisporea
agcgagcaggcggttggaacaccgcccctcaggggcaacccctgggagcacgacccgaagaacccactgcgccccaggcagaacggcacgctccgcgtgcttggctgcccgaagtggcggagaaggcgtcgcgcc

SEQ ID NO: 18339 - RNA, 136 nt, unidentified
  source 1..136: mol_type = other RNA; note = Related to JAAATY010000004.1; note = Kibdelosporangium persicum
ggtgagcacggtggtgaacaccacccctctggggttaccccagggagcacggcattaccggaggatggcgccccacgcgcgacggcacacgctgtgtacgtgcgtgcgcgcggacatcgggagaacgagtcactcc

SEQ ID NO: 18340 - RNA, 136 nt, unidentified
  source 1..136: mol_type = other RNA; note = Related to JADBEI010000001.1; note = Kibdelosporangium phytohabitans
ggtgagcacggtggtgagaaccacccctctggggataccccagggagcaaggcattacctgcggttggcgccccacgcgcggcggcacactccgtgtacgtgggtgcgcgcggatatcgggagatggagtcactcc

SEQ ID NO: 18341 - RNA, 136 nt, unidentified
  source 1..136: mol_type = other RNA; note = Related to NZ_FWXV01000002.1; note = Kibdelosporangium aridum
agtgagcacggtggtgaacaccacccctctggggctaccccagggagcacggatttacctgcggatggcgccccacgcgcgacagcacacgctgtgtacgcatgggcgcgcggatatcgggagaacaggtcacttc

SEQ ID NO: 18342 - RNA, 133 nt, unidentified
  source 1..133: mol_type = other RNA; note = Related to JAGINW010000001.1; note = Kibdelosporangium banguiense
ggtgagcaggtggaacatcacccctccggggtaaccccggggagcacggtattatctgggcatgacaccccacgcgcgtcggtacgctccgcggatccaggggcgcgcggatatcgggagaaagagtcacttc

SEQ ID NO: 18343 - RNA, 142 nt, unidentified
  source 1..142: mol_type = other RNA; note = Related to AM420293.1; note = Saccharopolyspora erythraea
gccgaggcgtccggtgccgggcgggcaccgctccgaggcaacctcggggagtaccaacgcagtcgagcacggcgtccgacgcgccactgggagacgctgccgcgtctgtccgcgcgccggggaacgcagatcgggtcgccgc

SEQ ID NO: 18344 - RNA, 140 nt, unidentified
  source 1..140: mol_type = other RNA; note = Related to NZ_CP007155.1; note = Kutzneria albida
agcgagcaggcgggcaaccgtcactccggggcaaccccggggagcaccaccacagcggggcatggcgccccgcgcgcaacaccaccgctgcacgctccgcgtgaccaccgcgcgcggccgtggcgagaacaggtcgccgc

SEQ ID NO: 18345 - RNA, 158 nt, unidentified
  source 1..158: mol_type = other RNA; note = Related to NZ_JAJGSX010000003.1; note = Pseudonocardia sp.
aacgagacggcgagaacctgcccgtgcacgtcacggcaggccttgctgctccggggcaaccccggggtgcaccacttctgcgcagcatggcgtcccgcgcgcgcgaggcacaggaagagtgccgacggcgcgcggcggacgggaacaccggtcgctcg

SEQ ID NO: 18346 - RNA, 158 nt, unidentified
  source 1..158: mol_type = other RNA; note = Related to NZ_JAAXKY010000083.1; note = Pseudonocardia xinjiangensis
gacgagacggcgagcacccgcccaagcaccacccggcgggtctcgtggctccggggcaaccccggggtgcaccacctctctgcggcatggcgtcccgcgcaccccgggcacgaacgcagtgccgtcagtgcgcggccgacgggaacaccggtcgtcgc

SEQ ID NO: 18347 - RNA, 152 nt, unidentified
  source 1..152: mol_type = other RNA; note = Related to NZ_JADQDF010000001.1; note = Pseudonocardia oceani
gtcgagacggcgagcacccggcccccacggcgggtctcgtggctccggggcgaccccggggtgcaccacctcagtgcggcacggcgtcccacgcaggacgggcaggtacggcatgccccctctgcgcggcggacgggaacaccggtcgtccg

SEQ ID NO: 18348 - RNA, 152 nt, unidentified
  source 1..152: mol_type = other RNA; note = Related to NZ_CP013854.1; note = Pseudonocardia sp.
gacgagtgggcggtcgtcccggctccggccggggcccgcggctccggggtgaccccggggtgcaccggtactgcgcagcacggcgtcccgcgcgcgtcgggcaggacagcgctgcctgcggcgcgcggcggacagcgaacacgggtcgtcgg

SEQ ID NO: 18349 - RNA, 124 nt, unidentified
  source 1..124: mol_type = other RNA; note = Related to BEGX01000057.1; note = Pseudonocardia sp.
ggcgcggatcgcggctccggggaaaccccggggtgcaccacctcagcgggccatcgcgtcccgcgcgtgcggtcactgctcccgcgtgagtctgcgcgcggcggacaggaacccaggtcgaccg

SEQ ID NO: 18350 - RNA, 129 nt, unidentified
  source 1..129: mol_type = other RNA; note = Related to NZ_BJVJ01000106.1; note = Pseudonocardia sulfidoxydans
gtcgcggctcggatcgcggccccggggcaaccccggggtgcaccggttcagcggggcacggcgtcccgcgcgcgtggtcactgctcgcgcgtgagtctgcgcgcggcggacaggaacacaggtcgaccg

SEQ ID NO: 18351 - RNA, 163 nt, unidentified
  source 1..163: mol_type = other RNA; note = Related to CP002593.1; note = Pseudonocardia dioxanivorans
gacgagtcggcggtccggtgtggtggtctcggccaccacggcgcggaccgcggctccggggcaaccccggggtgcaccttctcagcgggactcggcgtcccgcgcgcgtggtcactgctcccgcgtgagtctgcgcgcggcggacaggaacccaggtcgaccg

SEQ ID NO: 18352 - RNA, 154 nt, unidentified
  source 1..154: mol_type = other RNA; note = Related to NZ_FNBE01000010.1; note = Pseudonocardia oroxyli
gacgagtcggcgaaccgtcgggccctcgggcccggccttcgcggctccggggcaaccccggagtgcaccatccctgcaccgcacggcgtcccgcgcgcggcggcccgcaccacggggacgtgggcgcgcggcggacgagagcccaggtcgtacg

SEQ ID NO: 18353 - RNA, 145 nt, unidentified
  source 1..145: mol_type = other RNA; note = Related to NZ_JIAI01000002.1; note = Pseudonocardia acaciae
gtggagtcggcgtgggccccgttcgcggggcggcgtcggtccggggcaaccccgggcagcaggtactcagcaccgcatggcgtcccgcgcgcgaccgcacggttggtgccccggcgcgcggatgacagggagaaccggtcctccg

SEQ ID NO: 18354 - RNA, 144 nt, unidentified
  source 1..144: mol_type = other RNA; note = Related to REAM01000105.1; note = Betaproteobacteria bacterium
gtctagctttgttgcaatcgattcttcgatgacattgcggacgcgcggggttaccccgcgtgacaacttatcgatactttcccggcgcggttggcggtgcgtcttcgccgcacacataaccgcgatccgacacgcggtagacgc

SEQ ID NO: 18355 - RNA, 132 nt, unidentified
  source 1..132: mol_type = other RNA; note = Related to JAHQVJ010000021.1; note = Myxococcales bacterium
cccgagcatccgaggtctcgatctcgaccctggggctaccccagggctgttccacaacctagcttccaccggcccacggcacgcgctgcgcgttgcgcagaacacgccgcggcgggccagatccgtcgggga

SEQ ID NO: 18356 - RNA, 129 nt, unidentified
  source 1..129: mol_type = other RNA; note = Related to JACKEN010000003.1; note = Deltaproteobacteria bacterium
tccgagtgatggggtcttggacctccctccgggggacccccgggggcgtaaactgagcttgcatctacgtcaccgcggcctcggtccgcggtcacggacggcagccgcggcagaccggcgagtcggggt

SEQ ID NO: 18357 - RNA, 132 nt, unidentified
  source 1..132: mol_type = other RNA; note = Related to NZ_CP036267.1; note = Thalassoglobus polymorphus
cataagcttggtccgcaaggacactgtggggttaccccacgggagaaacgttgttcgagattcgtcggatgaagctgtgtgacggaaagcattgtttccgtcacacagcttcgccacaggatgcgttgtgca

SEQ ID NO: 18358 - RNA, 132 nt, unidentified
  source 1..132: mol_type = other RNA; note = Related to JABJMI010000419.1; note = Planctomicrobium sp.
cataagcttggtccgtaaggacactgtggggttaccccacgggagaaacgttgttcgtgattcgtcggtagacctttgctaaccgaaagcattgtttcggttagcaaaggtcgccacaggatgcgttatgca

SEQ ID NO: 18359 - RNA, 130 nt, unidentified
  source 1..130: mol_type = other RNA; note = Related to NZ_SIHI01000002.1; note = Thalassoglobus neptunius
cacaagccttgtccgttggacactgcggggttaccccgcgggagaagtgttgttcccgattcgatggatgaaggttctcaacgccaagcaagtttgcgttcagaaccttcgccacaggatgcgttgtgcg

SEQ ID NO: 18360 - RNA, 129 nt, unidentified
  source 1..129: mol_type = other RNA; note = Related to NZ_FOQD01000010.1; note = Planctomicrobium piriforme
cacaagcccggtcctctggacactgtggggttaccccacgggagaatcgttgctccgcattcggcggatgaatgttgaccacggtacgacttgtaccgtcgcaacatacgctacaggattcgttgtgca

SEQ ID NO: 18361 - RNA, 129 nt, unidentified
  source 1..129: mol_type = other RNA; note = Related to JAGQPW010000040.1; note = Planctomycetaceae bacterium
cacaagctctgtccctcgggacattgtggggataccccacgagagatgcgttgttcgattctcatcggtagaagattgccgacgggcagaattgcccgtcgcaatcttcgccacaggattcgttgtgcg

SEQ ID NO: 18362 - RNA, 129 nt, unidentified
  source 1..129: mol_type = other RNA; note = Related to JAGQQB010000156.1; note = Planctomycetaceae bacterium
cacaagccctgtccttcgggacattgtggggttaccccacgagtgaagtgttgttcgattctcattggaagaagcttggcagcgacgagatgtcgtcgccgcaagcttcgccacaggattcgttgtgcg

SEQ ID NO: 18363 - RNA, 122 nt, unidentified
  source 1..122: mol_type = other RNA; note = Related to NZ_CP036275.1; note = Maioricimonas rarisocia
cacaagctcacaggtctgtggggctaccccacggcagaagcgttgaccgcatctcgttgcaggaatttgtcgcaacgaagacgattcgttgcagacaaattcgccacaggatccgttgtgcg

SEQ ID NO: 18364 - RNA, 130 nt, unidentified
  source 1..130: mol_type = other RNA; note = Related to JAGQQF010000427.1; note = Planctomycetaceae bacterium
cccaagctcagtccttcgggacgctgtggggataccccacggaagaagcgttgagagcatctcgtcgcgtgagtttgcaaccgacgagtcgtttcgtcggtcgcaaactcgccacaggatccgttgggcg

SEQ ID NO: 18365 - RNA, 148 nt, unidentified
  source 1..148: mol_type = other RNA; note = Related to JABISG010000096.1; note = Planctomycetaceae bacterium
cacaagaatgttcgcagtcaccttgattggtgattccggacgctgcggggttaccccgcggaagaagcgttgttcgacattcgccgcgacaatgtccttcggttaagagctttaaccgacggacattcgccacaggatcggttgtgcg

SEQ ID NO: 18366 - RNA, 133 nt, unidentified
  source 1..133: mol_type = other RNA; note = Related to JAGQPX010000026.1; note = Planctomycetaceae bacterium
gataagctgttgccgtcttcggcactgtggggttaccccacgggagaatcgttgttcccatctcgtcgcgtgaatctgtgaacggcaaagccttgtttgccgttcacagattcgccacaggatccgttacccg

SEQ ID NO: 18367 - RNA, 121 nt, unidentified
  source 1..121: mol_type = other RNA; note = Related to JAEUIG010000100.1; note = Planctomycetaceae bacterium
cataagctctcaggtctgtggggttaccccacggcagaaggcgtgtctttcattcgacagtgaggagtcacggattcggactctcgaatccgtcacacctcgccacaggatgcgttgtgcg

SEQ ID NO: 18368 - RNA, 123 nt, unidentified
  source 1..123: mol_type = other RNA; note = Related to QQVO01000002.1; note = Planctomycetes bacterium
cacaagctgtcaggtctgtggggctaccccacggcagaagcgttgttcgtcattcatgcgtgagcaaacgcgctgattgtggctcacaatcagcggtttgcccgccacaggatgcgttgtgcg

SEQ ID NO: 18369 - RNA, 136 nt, unidentified; identical to SEQ ID NO: 17810
  source 1..136: mol_type = other RNA; note = Related to NZ_CP036271.1; note = Caulifigura coniformis

SEQ ID NO: 18370 - RNA, 133 nt, unidentified
  source 1..133: mol_type = other RNA; note = Related to JAHBXW010000001.1; note = Planctomyces sp.
cacaagcgttggtcctttcgaggacgctgcggggcaaccccgcggtagaagcgttgacgatcattcatccgagaatttgtgctcggcaatgcgttgtttgccgagacaaattcgccacaggattcgttgtgcg

SEQ ID NO: 18371 - RNA, 151 nt, unidentified
  source 1..151: mol_type = other RNA; note = Related to VGXY01000890.1; note = Planctomycetes bacterium
cacaagctcgattcgcacgttcctgaccggaacgtgacgaatgctgcggggttaccccgtggtcgctgcgttgttcgagattcgtggtgtgaattgtcggacggagtcgtcagtaactccgtcgacaattcgctacgggatcagttgtgcg

SEQ ID NO: 18372 - RNA, 148 nt, unidentified
  source 1..148: mol_type = other RNA; note = Related to JACMJF010000970.1; note = Candidatus Saccharimonas sp.
cacaagctcgattcgcgcgtccctgaccggacgtgtcgaatgctgcggggttaccccgcggtcgccgtgttgttcgagattcgtggtgtgaattgtcggtgtggtggacctcaccacaccgacaattcgctacgggatcggttgtgcg

SEQ ID NO: 18373 - RNA, 151 nt, unidentified
  source 1..151: mol_type = other RNA; note = Related to JAFEBS010000049.1; note = Planctomycetes bacterium
cacaagttcaattcgcacgtccctgaccggacgtgatgaatgctgcggggttaccccgcggtcgctgcattgctcgggattcgtggtgtgaattgtcggcaacggtggactcatcaccgttgcgacaattcgctacgggatcggttgtgcg

SEQ ID NO: 18374 - RNA, 150 nt, unidentified
  source 1..150: mol_type = other RNA; note = Related to QWPM01000121.1; note = Planctomycetes bacterium
cacaagacacgtttggcctccctgacgggatgagctgaacactgcggggttaccccgcggtcgctgagttgttcctcaatcgagctgtgaagagccggcgacggtagacctcttaccgccgcggctcttcgccacgggatcggttgtgcg

SEQ ID NO: 18375 - RNA, 150 nt, unidentified
  source 1..150: mol_type = other RNA; note = Related to NZ_JH636437.1; note = Schlesneria paludicola
cacaagacacgtttggccgtccctgttcgggatgtgctaaacactgcggggttaccccgcggtcgcagagttgttcctcaatcgagctgtgaagagctgtgacggtagtcgataccgtcaacagctcttcgccacgggatcggttgtgcg

SEQ ID NO: 18376 - RNA, 127 nt, unidentified
  source 1..127: mol_type = other RNA; note = Related to QWPB01000058.1; note = Planctomycetes bacterium
gccaagccttggtccttcgggacactgcggggataccccgtggaagactcgttgttcgacattcaccgtgagtttgttcaagctgtgcgtacagtttgaacaaactcgccacaggatgcgttgagtg

SEQ ID NO: 18377 - RNA, 131 nt, unidentified
  source 1..131: mol_type = other RNA; note = Related to QWOR01000226.1; note = Planctomycetes bacterium
gccaagcttttgtccttcgggacgctgcggggttaccccgtgggagactcgttgttggtcattcaacgtgagtttgccggagttgagcttgtcgtcatctccagcaaactcgacacaggatgcgttgtgcg

SEQ ID NO: 18378 - RNA, 143 nt, unidentified; identical to SEQ ID NO: 17808
  source 1..143: mol_type = other RNA; note = Related to NZ_CP011270.1; note = Planctomyces sp.

SEQ ID NO: 18379 - RNA, 146 nt, unidentified
  source 1..146: mol_type = other RNA; note = Related to JADZEF010000283.1; note = Planctomycetaceae bacterium
cccaagctcagttcgcccgtccgcaaggatcgtcgaacgctgcggggataccccgtggaagcagtcatgtccgccattcgtggcgtgaatggtcgctccggacgcactggtccgttgcaaccattcggcacaggatccgttgtgcg

SEQ ID NO: 18380 - RNA, 142 nt, unidentified
  source 1..142: mol_type = other RNA; note = Related to JAGQPV010000469.1; note = Planctomycetaceae bacterium
cacaagtcctgttcgccagacctgttctgtcgagcactgcggggttaccccgcgggagacgcattgcgcggcattcgatccgcgaataatcggtcaggacgtccgtcctgatccgattattcggcacaggaacagttgtgcg

SEQ ID NO: 18381 - RNA, 143 nt, unidentified
  source 1..143: mol_type = other RNA; note = Related to JACCRE010000317.1; note = Planctomycetaceae bacterium
cccaagcatcgcccggggctgaaagactgcccccggcaccgcggggctaccccgcggcagacgcgttgctcaccattcgaggcgtgagccaatccgcggaccgctgggaccgcagactggctcggcacaggaccggttgggcg

SEQ ID NO: 18382 - RNA, 149 nt, unidentified
  source 1..149: mol_type = other RNA; note = Related to NC_015174.1; note = Rubinisphaera brasiliensis
cataagctcggctcgcctgttcagcattcctgaacctgcgagcgctgtggggataccccacggtcgactcattgctggctttccgcactgaatgaaacagtggttgggctttcaaccaccgtcccattcgcgacaggatcggttattca

SEQ ID NO: 18383 - RNA, 148 nt, unidentified
  source 1..148: mol_type = other RNA; note = Related to JAGQQR010000004.1; note = Planctomycetaceae bacterium
cataagctcggtctgcagggagtttaattatgacttgcagacgctgtggggttaccccatggtcgactcattgccggctttccggattgaatgaaacagcgggtggacattcacccgccgtcccattcgcgacaggatcggttattcg

SEQ ID NO: 18384 - RNA, 134 nt, unidentified
  source 1..134: mol_type = other RNA; note = Related to JAGQQT010000159.1; note = Planctomycetaceae bacterium
cataagctcggcttgtttcggcaagcgctgtggggttaccccacggtcgaatcattgttgacttctcgtcaggaaccaaagaccagtccggtcaccggactggtactttggttcgggacaggatcggttatccg

SEQ ID NO: 18385 - RNA, 133 nt, unidentified
  source 1..133: mol_type = other RNA; note = Related to NZ_SJPG01000001.1; note = Rubinisphaera italica
cataagctcggcttgcttcggcaagcgctgtggggttaccccatggtcgaatgattgttgacatttcgataggaatgaagccgtggcttggacgacaagccacagcttcattcgcgacaggatcggttatccg

SEQ ID NO: 18386 - RNA, 140 nt, unidentified
  source 1..140: mol_type = other RNA; note = Related to JAKFGB010000009.1; note = Rubinisphaera sp.
cataagctcggcttgcaggcaactgcaggcgctgtggggttaccccatggtcgattgattgttgactttacgattggaatgaaaaggcggcttgggctttcaagccacccgttttcattcgcgacaggatcggttatacg

SEQ ID NO: 18387 - RNA, 151 nt, unidentified
  source 1..151: mol_type = other RNA; note = Related to BJHP01000039.1; note = Planctomycetia bacterium
cccaagccttgttggtgagctgctttgacggcggctcaacaacgccacggggataccccgcggttgtttgcttgtgttgatttcgttgccgtaccggcaccgcgagaggagtttttctcgcacgtcggtacgctactggacccgttgagca

SEQ ID NO: 18388 - RNA, 150 nt, unidentified
  source 1..150: mol_type = other RNA; note = Related to VGZH01000005.1; note = Planctomycetes bacterium
cccaagccttgttgctgagctgctttgaccgcggctcaacaacgccccggggataccccgcggtagttcgcttgcgttgatttcgttgccgtagccggcaccgagaagtcatgttcttgccaccggctacgctactggacccgttgagca

SEQ ID NO: 18389 - RNA, 151 nt, unidentified
  source 1..151: mol_type = other RNA; note = Related to JAFEBR010000742.1; note = Planctomycetes bacterium
cacaagccctgttcggcacgctttcgggcgtaaccggacggctgtggggataccccgcagaagaataattgtcagcatttcgaatgtggattcaccgcggcggtgcgactgtgcaccgccgcgtgaatccgccacaggaacgagttgtgcg

SEQ ID NO: 18390 - RNA, 152 nt, unidentified
  source 1..152: mol_type = other RNA; note = Related to JACQFH010000599.1; note = Planctomycetia bacterium
cacaagaccggttcggcacgccttgactggcgttccgaatggctgcggggataccccgcggatgaagcattgtcagcatttcgaacgtggattcgccaacgcggagcgacactgctccgcgtcgggaatccgccacaggaacgagttgtgcg

SEQ ID NO: 18391 - RNA, 144 nt, unidentified
  source 1..144: mol_type = other RNA; note = Related to RPPR01000054.1; note = Planctomycetaceae bacterium
cacaagatacagaccggcgttcatcgcgccgggcgactgcggggataccccgcgggagaactgatgtctgactttcgcggcgcgacttgccgccggtacgaccttgtaccggccggcaagtcggccaccggaacgagttgggcg

SEQ ID NO: 18392 - RNA, 144 nt, unidentified
  source 1..144: mol_type = other RNA; note = Related to DNUF01000128.1; note = Planctomycetaceae bacterium
cacaagctgctgtttggcgcttcccgcgtcaaacgactgcggggttaccccgcgggagagtcattgtctgccattcgtatgggaagcgccgtgcggtacgaccctgcacacgcacgacgcttcgccacaggaacgagttgggcg

SEQ ID NO: 18393 - RNA, 150 nt, unidentified
  source 1..150: mol_type = other RNA; note = Related to NZ_SJPP01000003.1; note = Symmachiella macrocystis
cacaagatttgaccgatcctaccttgaccggtatgtcggtctgctgcggggctaccccgcggaagccacattgtttcacattcgatcgtgaatcgtgactcacgtggatcgtcacgtgagtcacgattcgccacaggaagcagttgttcc

SEQ ID NO: 18394 - RNA, 132 nt, unidentified
  source 1..132: mol_type = other RNA; note = Related to JAGQQA010000064.1; note = Planctomycetaceae bacterium
cacaagattcattcctctggaatgactgtggggctaccccacggaagattgattgttctggattcgcgacgtgaatagtcgtctgcggcaggatctcccgcagagactattcggcacaggaaaagttgtgcg

SEQ ID NO: 18395 - RNA, 147 nt, unidentified
  source 1..147: mol_type = other RNA; note = Related to SIAF01000026.1; note = Planctomycetaceae bacterium
cacaagccagtttcgacacgccctgaccggcgtggcgaacgctgcggggttaccccgcggacgtgtgattgccagacattcgatcgtggatattgccgtcgggagacggtcccgacggcaatatccgccacaggaatcagttgtgcg

SEQ ID NO: 18396 - RNA, 152 nt, unidentified
  source 1..152: mol_type = other RNA; note = Related to NZ_CP037422.1; note = Gimesia aquarii
cacaagttctgactctaactgaatcctgacggatcacttagagtactgcggggataccccgtgggagaagtattgaccattctacgatatgtgaagtatcgctacgatagactcttatcgtagcaatacttcgctacaggatcggttgtgcg

SEQ ID NO: 18397 - RNA, 152 nt, unidentified
  source 1..152: mol_type = other RNA; note = Related to NZ_CP037920.1; note = Gimesia aquarii
cacaagttctgactctaactgaatcctgacggatcacttagagtactgcggggataccccgtgggagaagtattgaccattctacgaaatgtgaagggtcgctacgatagactcttatcgtagcaacccttcgccacaggatcggttgtgcg

SEQ ID NO: 18398 - RNA, 152 nt, unidentified
  source 1..152: mol_type = other RNA; note = Related to NZ_CP037452.1; note = Gimesia fumaroli
cacaagttctgactctgattgtatcctgacggatcgctcagagcactacggggataccccgtgggagaagtattgaccattctacgacacgtgaagtatggctacgatagatggttatcgtagcaatacttcgccacaggatcggttgtgcg

SEQ ID NO: 18399 - RNA, 152 nt, unidentified
  source 1..152: mol_type = other RNA; note = Related to NZ_CP036353.1; note = Gimesia maris
cacaagttctgactctgactgaatcttgacggatcgctcagagttctgcggggataccccgtgggagaaggattgaccatgcatcgacacttgaagtgtcgctacgatagacgcttatcgtagcaacacttcgtcacaggatcggttgtgcg

SEQ ID NO: 18400 - RNA, 152 nt, unidentified
  source 1..152: mol_type = other RNA; note = Related to NZ_VTSR01000009.1; note = Gimesia chilikensis
cacaagctctgactctgaatgaatcctgaccgatttctcagagcactgcggggataccccgcgggagaagaattgaccagactacgacaggtgaagtgtcgcaacgaaagaccattttcgttgcaacacttcgtcacaggatgggttgtgcg

SEQ ID NO: 18401 - RNA, 136 nt, unidentified; identical to SEQ ID NO: 17804
  source 1..136: mol_type = other RNA; note = Related to CP036268.1; note = Planctomycetes bacterium Pan189

SEQ ID NO: 18402 - RNA, 149 nt, unidentified
  source 1..149: mol_type = other RNA; note = Related to NZ_CP036316.1; note = Calycomorphotria hydatis
cccaagttcagtcgccccgtctcatacggcgggcagtcgacactacggggttaccccgtggtagaattattgctcacttggcgtcgcgagtgcgtgcccaatcggttgatgaaccgattgagcacgcacggtacaggaagcgttgagcg

SEQ ID NO: 18403 - RNA, 145 nt, unidentified
  source 1..145: mol_type = other RNA; note = Related to JAGQQC010000202.1; note = Planctomycetaceae bacterium
cccaagatttggctcgccatccgcaaggatgccagccgctgtggggataccccacggtcgaagaattgcacgacattcgttcccggaagattgaagttgtatagaagttatacaattaaatcttcgcgacaggatgcgttgagcg

SEQ ID NO: 18404 - RNA, 145 nt, unidentified
  source 1..145: mol_type = other RNA; note = Related to NZ_CP036281.1; note = Polystyrenella longa
cccaagcccaggtttgccatccgcaaggatgacagccgctgtggggataccccacggtagaagagttgcttgacactcgttcccggaaggtgttaccgactagaagttagtcggtctacaccttcgcaacaggatccgttgagcg

SEQ ID NO: 18405 - RNA, 141 nt, unidentified
  source 1..141: mol_type = other RNA; note = Related to LYDR01000158.1; note = Planctopirus hydrillae
cacaagaagaggccatatcgctgaaaagcctggccggtgcggggttaccccgtgctcgaatgattgctcccatactgaactggaatcctgtctacggtggttccaccgtagacaggattcgaaacaggcattggttgtgcg

SEQ ID NO: 18406 - RNA, 139 nt, unidentified
  source 1..139: mol_type = other RNA; note = Related to JABTUM010000004.1; note = Planctomycetes bacterium
gtcaagcgaacgagcgcaagctcgggccgcggggttaccccgcgggcgaagacacggcttggatccgtcgtatgagctagacgcgcgatgggcgcggacgcgccatcgcgcgctagctccacacaggtgctgttgattt

SEQ ID NO: 18407 - RNA, 139 nt, unidentified
  source 1..139: mol_type = other RNA; note = Related to JACQFI010000030.1; note = Planctomycetes bacterium
gtcaagcgaactcgcgcaagcgagggctgcggggttaccccgcaggcgaactaatggcttgcattcgtcggttgtctgtatcccgcgactcgggcagtgccgagtcgcgggtacagaccacacaggtcaaggttgatac

SEQ ID NO: 18408 - RNA, 137 nt, unidentified
  source 1..137: mol_type = other RNA; note = Related to JACKID010000003.1; note = Planctomycetes bacterium
gatttgactgcgcaggcttcgcgccttcgcgcggcggggttaccccgccggaacgcagtggtttctcatgcattgcccgaccaagccgaggtttctgcgaaacctcggcttggtcggggccgggagctggaagtctc

SEQ ID NO: 18409 - RNA, 123 nt, unidentified
  source 1..123: mol_type = other RNA; note = Related to JAGQRI010000064.1; note = Planctomycetes bacterium
gacttgactgcgaaagcaggggcggggctaccccgtccattcgccaagcttcttcatgcaacgctggggtaacacggtcttctacgaagaccgtgttaccccaggccgggagccggaagtctc

SEQ ID NO: 18410 - RNA, 137 nt, unidentified; identical to SEQ ID NO: 18408
  source 1..137: mol_type = other RNA; note = Related to JACKID010000003.1; note = Planctomycetes bacterium

SEQ ID NO: 18411 - RNA, 134 nt, unidentified
  source 1..134: mol_type = other RNA; note = Related to JAGQRE010000003.1; note = Planctomycetes bacterium
gatttgactgcgctgacttcggtcaacgcgcgaaggggctaccccttcgaaacgcagtggtttctcatgcatcgcacgacctgaccggttcattgcatgaaccggtcaggtcgtggccgggagctggaagtctc

SEQ ID NO: 18412 - RNA, 124 nt, unidentified
  source 1..124: mol_type = other RNA; note = Related to JADLAK010000089.1; note = Planctomycetes bacterium
gatttgccggccgcaaggccgagacggggttaccccgtcatcgcagccagctagaccatgcgacgtctggatcgcgacaactctgcgagttgtctgcgatccaggccgggagcaaggaaatcgg

SEQ ID NO: 18413 - RNA, 232 nt, unidentified
  source 1..232: mol_type = other RNA; note = Related to OCMT01000001.1; note = Pedobacter xixiisoli
ctttcggatttaaaaaataccttgctttttctgcataagaaaatgatgatgtttcgtcatcgaagaattgatatttgacacacggcactacctgcaatctttatggggagaacacgtactatacgtacggtttcggttccatactccgcgagtttaaccgtacgtatagtacgtgttctctggagttgattgatatagtcctatgaaaatacgaaggattttaaattctgcc

SEQ ID NO: 18414 - RNA, 232 nt, unidentified
  source 1..232: mol_type = other RNA; note = Related to NZ_CP042171.1; note = Pedobacter sp.
ccctcggattaaaaaaataccttgctttttctgaataagaaaatggtgatgtttcgtcatcgatgaactaatatttgacactcggcactacctgcaatctttatggggagaacacgtaccatacgtacggtttcggttccatactccgcgagtttaaccgtacgtatggtacgtgttctctggagttgattgatatagtcctatgaaaatacgaaggattttaaattcgggc

SEQ ID NO: 18415 - RNA, 232 nt, unidentified
  source 1..232: mol_type = other RNA; note = Related to NZ_SJCY01000003.1; note = Pedobacter changchengzhani
tggcaattaatttagtaaataccttgcttttctgaataagaaaatgatgatgtttcgtcatcgatgaataatatttgacacacggcactacctgcaatctttatggggagaacacgtactatacgtacggtttcggtaccgtactccaagagtttaaccgtacgtatagtacgtgttctctggagttgattgatatagtcctatgaaaatacgaaggttctaaattaaagcc

SEQ ID NO: 18416 - RNA, 217 nt, unidentified
  source 1..217: mol_type = other RNA; note = Related to QVMJ01000008.1; note = Bacteroides sp.
agttcggaaagtaccttgcttttctgaaaagaaaaagatgatgtttcgtcatcggtgaatagatatttgacattcggcactacctccaatctttatggggagatacactactatacgcatggttgctgttctcctctccacgagattaaccatgcgtatagtagtgtatctctggagttgattgatatagtcctgggaaaatacgaagattccgaac

SEQ ID NO: 18417 - RNA, 219 nt, unidentified
  source 1..219: mol_type = other RNA; note = Related to JAJQFD010000060.1; note = Bacteroides sp.
cggtttagaaataccttgcttttctgcaaagaaaaagatgatgtttcgtcatcgatgagcaattgtttgacattcggcactacctgcaatctttatggggaggatacctactatacgtatggtttgctgttcttccctccgcgaggtaaaccatacgtatagtaggtatcctctggagttgattgatatagtcccaggaaaatacgaaggttctgaacc

SEQ ID NO: 18418 - RNA, 229 nt, unidentified
  source 1..229: mol_type = other RNA; note = Related to NZ_CP034930.1; note = Apibacter raozihei
gttcagggttaaaaaataccttgcttttctgaataagaaaaagatgatgtatcgtcatcggtgagctattgctagacattcggcactacctgcaatctttatggggagagtaactactatacgtatggttacggttctcctctccacgagtttaaccatacgtatagtagttactctctggagttgattgatatagtccttagaaaatacgaaggttttttaacctgaa

SEQ ID NO: 18419 - RNA, 230 nt, Flavobacterium sp.
  source 1..230: mol_type = other RNA; note = Related to PRDM01000004.1
gttttgagtttaagaaataccttgcttttcttgtataaagaaaatgatgatgtttcgtcatcggtgtaaaaatatttgacattcagcactacttctatcttatggatgagaaagtgtactaggcgtacagtttcggttccacctcctcgagattaactgtacgcctagtacactttctctggagttgatagacatagtccttagagaatacgaaggttttaaactttaag

SEQ ID NO: 18420 - RNA, 231 nt, Flavobacterium sp.
  source 1..231: mol_type = other RNA; note = Related to NZ_QJHK01000001.1; note = Flavobacterium cheongpyeongense
gttttgagtttaagaaataccttgctttttcttgtataaagaaaatgatgatgtttcgtcatcgatgtaaaattatttcacattcagcactacttctatcttatggatgagaaagggtactatacgtacagtttcggttccacctccttgagattaactgtacgtatagtaccctttctcgggagttgatagacatagtcctcagaaaatacgaaggttttaaacttttaa

SEQ ID NO: 18421 - RNA, 230 nt, Flavobacterium sp.
  source 1..230: mol_type = other RNA; note = Related to NZ_JASY01000021.1; note = Flavobacterium chungangense
gttttgagtttaagaaataccttgcttttcttgtataaagaaaatgatgatgtttcgtcatcggcgtaagattatttaacattcagcactacttctatcttatggatgagaaaaggtactatgcgtacagtttcggttccacctcctcgagattaactgtacgcatagtaccttttctcgggagttgatagacatagtccttagaaaatacgaaggttttaaactttaag

SEQ ID NO: 18422 - RNA, 230 nt, Flavobacterium sp.
  source 1..230: mol_type = other RNA; note = Related to NZ_CP091285.1; note = Flavobacterium jumunjinense
tgttacaagtttaagaaaaaccttgcttttcttttttaaagaaaaagatgatgtttcgtcatcgaagtacaattatttgacattcagcactacttctatctattggatgagaaagggtactatacgtacagtttcggttccgcctccacgagattaactgtacgtatagtaccctttctctggagttgatagacatagtccttagaaaatacgaaggtttaaactttagc

SEQ ID NO: 18423 - RNA, 202 nt, unidentified
  source 1..202: mol_type = other RNA; note = Related to DQAM01000521.1; note = Dysgonomonas sp.
aggtttggaaaataccttgcttttctgaataagaaaaagatgatgtttcgtcatcggcggaaaaatatttgacattcggcactacctgcaatctttattgggagaatagctactatacgcatnnnnnnnnnnnnatgcgtatagtagctattctctggagttgattgatatagtcccaggaaaatacgaaggttcccgaacc

SEQ ID NO: 18424 - RNA, 227 nt, unidentified
  source 1..227: mol_type = other RNA; note = Related to JAFKHH010000015.1; note = Filimonas sp.
gtcacggatttggaaagtaccttgcttttctgaataagaaaatgatgatgtatcgtcatcactgattcattataagacattcggcactacctgcaatcttatggggagaacacgcactagtatgtgcggtttcggtacccgctccaagagttcaaccgcacatactagtgcagttctcggagttgattgatatagtccgcggaaaatacgaaggttccgatccaggc

SEQ ID NO: 18425 - RNA, 231 nt, unidentified
  source 1..231: mol_type = other RNA; note = Related to NZ_OEPV01000013.1; note = Dysgonomonas sp.
aagtagaggttaagaaaatacttgcttttctgaataagaaaaagatgatgtttcgtcatcaatgagcaatatttatcattcagcactacctgcaatcttttggtggagaattggtactatacgtaccattagcagttctcctctcgttgcgagttaatggtacgtatagtaccattctctggagttgattgttgtagtcccaagaaaatacgaagcatgcttaccctcaca

SEQ ID NO: 18426 - RNA, 211 nt, unidentified
  source 1..211: mol_type = other RNA; note = Related to JAKVIP010000001.1; note = Chryseobacterium sp.
tagatagatccttgcttttctttttaagaaatgatgatgtttcgtcatcgatggaaaattgcttagcatactgcactacatactatctttatggtgaaattggtactagtgcgtgccttttcagttcattttccgggaaaataaaggtacgcactagtacccatttctggagttgatagatatagtccttagaagatacgaaggtatatca

SEQ ID NO: 18427 - RNA, 212 nt, unidentified
  source 1..212: mol_type = other RNA; note = Related to NZ_FQUT01000024.1; note = Chryseobacterium arachidis
aagatagatccttgcttttctttttaaagaaatgatgatgtttcgtcatcactgtgaaattgcttagcatacgtcactacatactatcttgatggggaaaatggtactagtaggtaccttttcagttcattttccgagaaaataaaggtacccactagtaccattttctggagttgatagatatagtccttagaaaatacgaaggtttatcc

SEQ ID NO: 18428 - RNA, 213 nt, unidentified
  source 1..213: mol_type = other RNA; note = Related to NZ_FTOV01000003.1; note = Chryseobacterium gambrini
aagatagatccttgctttcttttttaagaaaagatgatgtttcgtcatcactgtaaaattgcttagcttacggcactacatactatctttaatggggaaaatggtactagtgggtaccttttcagttcattttccgggaaaataaaggtacccactagtaccattttctgggagttgatagatatagtccttggaaaatacgaaggtttatcc

SEQ ID NO: 18429 - RNA, 211 nt, unidentified
  source 1..211: mol_type = other RNA; note = Related to NZ_JPRO01000015.1; note = Chryseobacterium luteum
aagatagatccttgcttttctttttaagaaatgatgatgtttcgtcatcgatgtaaaattgcttagcatactgcactacatactatctttaatggtgaaattggtactagtgcgtgccttttcagttcattttccgggaaaataaaggtacgcactagtaccatttctggagttgatagatatagtcctcagaagatacgaaggtatatca

SEQ ID NO: 18430 - RNA, 213 nt, Flavobacterium sp.
  source 1..213: mol_type = other RNA; note = Related to NZ_PJQW01000010.1
agttaaataccttgcttttcttgtaaaagaaaaagatgatgtttcgtcatcaagtagaaattgtatttcacacatcactacatactatctttagggtgagaatacgcactagtagtgcattttcggttccttctccgagagataaaatgcactactagtgcgtattctctggagttgatagatatagtccttagaaaatacgaaggatttaac

SEQ ID NO: 18431 - RNA, 216 nt, Flavobacterium sp.
  source 1..216: mol_type = other RNA; note = Related to NZ_CP090145.1; note = Flavobacterium sediminilitoris
aggttaagtaccttgcttttcttttaaaaagaaaaagatgatgtttcgtcatcaagtagaaattgtatttcacacatcactacatactatctttagggtgagaaaacgtactagtagtgcattttcggtgccttctccgagagataaaatgcactactagtacgttttctctggagttgatagatatagtcctaagagaatacgaaggttttaact

SEQ ID NO: 18432 - RNA, 211 nt, unidentified
  source 1..211: mol_type = other RNA; note = Related to JAIBAX010000003.1; note = Chitinophagales bacterium
ttgacattaccttgcttttctgaataagaaatgatgatgtttcgtcatcggtgtaagattgtaaatcatactacactacctactatctttatggtgagaataggtactatacgtgccttttcagaccattttccatgaaattaaaggcacgtatagtacctattctctggagttgatagatgtagtcctaagaagatacgaaggcatgtca

SEQ ID NO: 18433 - RNA, 211 nt, Flavobacterium sp.
  source 1..211: mol_type = other RNA; note = Related to NC_016001.1; note = Flavobacterium branchiophilum
aagaataaccttgcttttctatttatagaaatgatgatgtatcgtcatcgttgcatgtttgtaagacatactacactacatactatctttatggtgagaaagagtactatacgtgcattttcaggccattttccgagaaaccaaatgcacgtatagtactctttctctggagttgatagatatagtccttagtaaatacgaaggttacgct

SEQ ID NO: 18434 - RNA, 231 nt, unidentified
  source 1..231: mol_type = other RNA; note = Related to JAJQES010000108.1; note = Tannerellaceae bacterium
gggaggtttggaaataccttgcttctttttcagagaaagatgatgtttcgtcatcgttgtgctaagagttcatcacctgccctgcccgcaatcaccagaccggagcacaatggtttctttagcacgttatacagttcctactccgcgagatcaaacgttctaaagaaaccattgtgctccggagttgattgggatagtcccgggaaaatacgaaggatccaaaccaaagcc

SEQ ID NO: 18435 - RNA, 232 nt, unidentified
  source 1..232: mol_type = other RNA; note = Related to LJIE01000001.1; note = bacterium 336/3
ccatagagatttgaaaataccttgcttcttagcaataagatgaacgatgtttcgtcgttcttgaaaatttgtaacaaatacttcactacatactatctttatggtgactacaccaccctatcgggtgtttcctgtgttaccaccaagtgcttaaacacccgatagggtggtgtagtcttggagttgatagatatagtccagagaaaatacgaagttctttcaaatcattatc

SEQ ID NO: 18436 - RNA, 234 nt, unidentified
  source 1..234: mol_type = other RNA; note = Related to NC_018018.1; note = Bernardetia litoralis
aatacagtagttataagtaccttgctttctaagtttattcttagaatgaatgatgtttcgtcattcaagaaattttacctagcatacatcactacatactatctttatgatgactaacaccacctatatgctatttacggtatgagtgcgctgcacttaaatagcatataggtagtgttagtctggagttgatagatatagtcctcagataatacgaagattttataattgtat

SEQ ID NO: 18437 - RNA, 233 nt, unidentified
  source 1..233: mol_type = other RNA; note = Related to NZ_AUMD01000019.1; note = Eisenibacter elegans
caagagcgttaaaaataccttgcgttcccgttagagggaaaggatgatgtttcgtcatccgcgcttcattactgcacatgcttcactacgtgctatctttatttggcagatagggggatagtgaagcttttacggacaattttgccgagcaaaataaaagctccactatccccctatctgtggagttgacagacctagtccggagagcatacgaagttatttttatcacgctg

SEQ ID NO: 18438 - RNA, 225 nt, unidentified
  source 1..225: mol_type = other RNA; note = Related to RDZE01000015.1; note = Cytophagales bacterium
taaaaggctgaaaatacttgctttccccttaaaaggaaaaaatgatgtttcgtcattgtcgcaaaaaaacaacacttacatcactacatactatcttaatttagaagaactactactatatgacatttacaggtcatattcccagaatataaatatcatatagtagtggttctttgtgagttgatagatatagttctgagaaaatacgaagtaattttgcctttt

SEQ ID NO: 18439 - RNA, 234 nt, unidentified
  source 1..234: mol_type = other RNA; note = Related to JAAAKT010000013.1; note = Emticicia sp.
acaaagtaagagtaaataagaccttgccttccgaaaggaaagaacgatgtatcgtcgttcatgaaatttgactctacatgcatcactaaatacaatcttcactgtgagagctttgtctggtagacaatatttaacagtgaaaactccgagagtttaaaatatcgtctaccagaccgctctcttggagttgattgatttagtcataagaatcttcgaaggttttactctactttg

SEQ ID NO: 18440 - RNA, 227 nt, unidentified
  source 1..227: mol_type = other RNA; note = Related to JAFMYU010000001.1; note = Fibrella aquatilis
tcgggttggggttgcaagaccttgcctttccttcgggaaatgaatgatgtttcgtcattctggtaccaagactacacacgcctcactacgtcaatcgttactgtgggggagggggtactagtgcaccttcacagtgcggctcctggggagttgaaggtgcactagtaccccctccccctggagttgattgacatagtcctgagtttgttcgaaggccttcccgcccg

SEQ ID NO: 18441 - RNA, 232 nt, unidentified
  source 1..232: mol_type = other RNA; note = Related to NC_020054.1; note = Fibrella aestuarina
gtgcggcgggcgtcaaaaccttgcctttccctcagggaaacgaatgatggttcgtcattccggtatcaagactacacacgcatcactacgtcaatcgttactgtggggagagggtactagtacgaccctcacagtgcgactcctgtggagttgagggtcgtactagtaccctctcccctggagttgattgacatagttctcagtttgttcgaaggctggcccggctgccgcc

SEQ ID NO: 18442 - RNA, 230 nt, unidentified
  source 1..230: mol_type = other RNA; note = Related to NZ_PVTE01000003.1; note = Spirosoma oryzae
acggtcaggcacgcaaaagaccttgcgtttccttcgggaaaagaacgatgtttcgtcgttcgtgccaactgacttcacacgcatcattacgtgcaatcgttactgtggggggcttcgtactaggggcaccttttcggtacgactcctgcggactaaaaggtgcccctagtacggccccccgggagtggattgacgtaatcctgagattgttcgaaggccgtgtctgactg

SEQ ID NO: 18443 - RNA, 229 nt, unidentified
  source 1..229: mol_type = other RNA; note = Related to JAGHZS010000007.1; note = Chitinophaga sp.
tgtaaagaggaattgattgcacttgcgcccgaaaagggacgaatgatgtttcgtcattcaggtttattgactatacatgcttcactaaatgcaatctttactttgggaggggcctaccatacgcatatttccggtagtagccccgagggctgaaatatacgtatggtaggcccctccctggagttgattgatttagtcaatggttcgcacgaaggcctttcctctttac

SEQ ID NO: 18444 - RNA, 230 nt, unidentified
  source 1..230: mol_type = other RNA; note = Related to NZ_JAGTXB010000010.1; note = Chitinophaga hostae
tgtaaagaggaattgattgcacttgcgcccgaaaagggacgaatgatgtttcgtcattcaggtattttgactatacatgcttcactaaatgcaatctttactttgggaggggcctaccatacgcatatttccggtagcagccccgggggctgaaataatgcgtatggtaggcccctccctggagttgattgatttagtcaatggttcgcacgaaggcctttcctctttac

SEQ ID NO: 18445 - RNA, 230 nt, unidentified
  source 1..230: mol_type = other RNA; note = Related to NZ_FOJG01000002.1; note = Chitinophaga arvensicola
tgtaaagaggaattgattgcacttgcgcccgaaaagggacgaatgatgtttcgtcattcaggtattctgactatacatgcttcactaaatgcaatctttactttgggaggggcctactatacgcatatttccggtagtagccccgagggctgaaatatgcgtatagtaggcccctccctggagttgattgatttagtcaatggtttgcacgaaggccttttcctctttac

SEQ ID NO: 18446 - RNA, 230 nt, unidentified
  source 1..230: mol_type = other RNA; note = Related to NZ_VIWO01000002.1; note = Chitinophaga polysaccharea
tgtaaagaggaattgattgcacttgcgcccgaaaagggacgaatgatgtttcgtcattcaggtattttgactatacatgcttcactaaatgcaatctttactttgggaggggcctaccatacgcatatttccggtagaagccccaggggctgaaatatacgtatggtaggcccctcccttgagttgattgatttagtcaatggcttgcacgaaggcctcttcctctttac

SEQ ID NO: 18447 - RNA, 233 nt, unidentified
  source 1..233: mol_type = other RNA; note = Related to NZ_FRBL01000014.1; note = Chitinophaga jiangningensis
tataaagaggaattgattgcacttgcgctccttcatggagatgaatgatgattcgtcattcaggtattttgactatacatgcttcactaaatgcaatctttactttgggaggggcctactatgtagatatttacggtaagagcccctggggcttaaatatccacatagtaggcccctccctggagttgattgatttagtcaatggtttgcacgaagcgccctttcctctttat

SEQ ID NO: 18448 - RNA, 234 nt, unidentified
  source 1..234: mol_type = other RNA; note = Related to NZ_QLMA01000005.1; note = Chitinophaga dinghuensis
tataaagaggaattgattgcacttgcgctccttcatggagatgaatgatgtttcgtcattcaggtattctgactatacatgcttcactaaatgcaatctttactttgggaggggcgtactatatcgatatttacggtataagccccttggggcttaaatatcaatatagtacgcccctccctggagttgattgatttagtcaatggtttgcacgaagcgccctttcctctttat

SEQ ID NO: 18449 - RNA, 232 nt, unidentified
  source 1..232: mol_type = other RNA; note = Related to VWWO01000002.1; note = Chitinophaga sp.
tataaagaggaattgattgcacttgcgctccttacggagatgaatgatgtttcgtcattcaggtatactgactatacatgcttcactaaatgcaatctttactttgggaggggcgtactagtatgatatttactgtacaagcccctggggctcaaatatcacactagtacgcccctccctggagttgattgatttagtcaatggcttgcacgaagcgcctgttcctctttat

SEQ ID NO: 18450 - RNA, 230 nt, unidentified
  source 1..230: mol_type = other RNA; note = Related to NZ_PYAW01000007.1; note = Chitinophaga niastensis
tgtaaagaggaattgattgcacttgcgcccgaaaagggatgaatgatgtttcgtcattcaggtatattgactatacatgcttcactaaatgcaatctttactttgggaggggcgtactatggtgatatttactgtacgcgccccgggggctgaaatatcaccatagtacgcccctccctggagttgattgatttagtcataggtttgcacgaaggccttttcctctttac

SEQ ID NO: 18451 - RNA, 231 nt, unidentified
  source 1..231: mol_type = other RNA; note = Related to NZ_CP051205.1; note = Chitinophaga oryzae
tgtaaagaggaattgattgcacttgcgcccgtaaaagggacgaatgatgtttcgtcattcaggaattatgactatacatgcttcactaaatgcaatctttactttgggaggggcgtacctagtgcgaatttacggtacgagccccgggggctgaaattcacactaggtacgcccctccctggagttgattgatttagtcaatggcttgcacgaaggccttttcctctttac

SEQ ID NO: 18452 - RNA, 231 nt, unidentified
  source 1..231: mol_type = other RNA; note = Related to NZ_QFFJ01000003.1; note = Chitinophaga flava
tgtaaagaggaattgattgcacttgcgcccgtaaaagggacgaatgatgtttcgtcattcaggtattttgactatacatgcttcactaaatgcaatctttactttgggaggggcgtacctagtgcgaatttacggtactagccccgggggctgaaattcacactaggtacgcccctccctggagttgattgatttagtcaatggcttgcacgaaggcctcttcctctttac

SEQ ID NO: 18453 - RNA, 231 nt, unidentified
  source 1..231: mol_type = other RNA; note = Related to NZ_RIAR02000001.1; note = Chitinophaga solisilvae
tgtaaagaggaattgattgcacttgcgcccgtaaaagggacgaatgatgtttcgtcattcaggtattttgactatacatgcttcactaaatgcaatctttactttgggaggggtgtacctagtgcgaattttcggtacgacccccgaggggtgaaattcacactaggtacacccctccctggagttgattgatttagtcaaaggtttgcacgaaggccttttcctctttac

SEQ ID NO: 18454 - RNA, 232 nt, unidentified
  source 1..232: mol_type = other RNA; note = Related to JACMJX010000348.1; note = Chitinophagaceae bacterium
ttgtaaggaggtttgattgcacttgcgcccgtaacagggaagagtgatgtttcgtcactcaggttaaatgactttacatgcttcactaaatgcaatctttactatgggatgggggtacctatgtagatttgacggtactccccccgggggggcaaaatctacataggtacccccatccctggagttgattgatttagtcaaaggtttgcacgaagggccattcctccttaca

SEQ ID NO: 18455 - RNA, 232 nt, unidentified
  source 1..232: mol_type = other RNA; note = Related to NZ_CP077769.1; note = Chitinophaga sp.
taaggaggaaaaatgattgcacttgcgcccttttatagggaagagtgatgtttcgtcactcaggtaacatgactatacatgcttcactaaatgcaatctttactttgggaggggcgtacctatgcacaatttacggttcacgcccccggggcgcaaattatgcataggtacgcccctccctggagttgattgatttagtcaatggctagcacgaaggccttttttcctcttt

SEQ ID NO: 18456 - RNA, 232 nt, unidentified
  source 1..232: mol_type = other RNA; note = Related to NZ_JAICCF010000004.1; note = Chitinophaga rhizophila
gtaaagaggaaattgattgcacttgcgcctggtttcaggaagagtgatgtttcgtcactcaggtaacatgactttatcatgcttcactaaatgcaatctttactttggacggggcgtacctactagtgatttacggtactagccccgggggctccaaatcaccagtaggtacgccccgtcctggagttgattgatttagtcaatggcttgcacgaaggccgtttcctcttta

SEQ ID NO: 18457 - RNA, 233 nt, unidentified
  source 1..233: mol_type = other RNA; note = Related to NZ_CP048113.1; note = Chitinophaga sp.
gtaaagaggaaattgattgcacttgcgcctggtttcaggaagagtgatgtttcgtcactcaggtaacatgacattatcatgcttcactaaatgcaatctttactttgggaggggcctacctagtagtgatttacggtacgagccccaggggctccaaatcaccactaggtaggcccctccctggagttgattgatttagtcaatggcttgcacgaaggccgatttcctcttta

SEQ ID NO: 18458 - RNA, 234 nt, unidentified
  source 1..234: mol_type = other RNA; note = Related to NZ_PYGK01000009.1; note = Chitinophaga ginsengisoli
ttgtaaagaggaaagtttgcacttgcgcctggtttcaggaagagtgatgtttcgtcactcaggtaacatgacattatcatgcttcactaaatgcaatctttactttgggcggggcgtacctaccagtaatttacggtacgagccccgggggctccaaattaccggtaggtacgccccgccctggagttgattgatttagtcaatggcttgcacgaaggctatttcctctttaca

SEQ ID NO: 18459 - RNA, 233 nt, unidentified
  source 1..233: mol_type = other RNA; note = Related to WRXN01000012.1; note = Chitinophaga tropicalis
tgtaaagaggaaatgattgcacttgcgcccgtaacagggaagagtgatgcttcgtcactcaggtaacatgactatacatgcttcactaaatgcaatctttactttgggcggggcacacctaccagtgatttacggtagaagccccgggggctataaatcaccggtaggtgtgccccgccctggagttgattgatttagtcaaaggcttgcacgaagggccgtttcctctttac

SEQ ID NO: 18460 - RNA, 232 nt, unidentified
  source 1..232: mol_type = other RNA; note = Related to NZ_QTJV01000007.1; note = Chitinophaga silvisoli
tataaagaggaaatgattgcacttgcgcccgtaaaagggacgaatgatgtttcgtcattcaggtaacatgactatacatgcttcactaaatgcaatctttactttgggaggggcgtactatagtgcaatttacagtactcgccccaggggccctaaattacactatagtacgcccctccctggagttgattgatttagtcaaaggcttgcacgaaggccatttcctctttat

SEQ ID NO: 18461 - RNA, 225 nt, unidentified
  source 1..225: mol_type = other RNA; note = Related to NZ_SEWF01000012.1; note = Emticicia agri
aaagtgagaagtactgaataccttgcattccgaaaggaaagaacgatgtatcgtcgttcatgacacaagacttcacacgcatcactaaatacaatctttactgtgaggggggctactataataccttttacagtaaaagctccgggagcttaaaaggtattatagtagcccccctcttggagttgattgatttagtctggagtaccatcgaaggttttctcactt

SEQ ID NO: 18462 - RNA, 230 nt, unidentified
  source 1..230: mol_type = other RNA; note = Related to QVMT01000016.1; note = Emticicia sp.
gcaaagtgagaagactaaagaccttgcattccgaaaggaaagaatgatgtttcgtcgttcatgaaacaagactttacacgcgtcactaaatacaatctttactgtgagggctatgtaccagtatgcattttacagtaaatgctccaggagcacaaaatgcacactggtacatgccctcttggagttgattgatttagtcctgagtatcttcgaaggtttttctcactttg

SEQ ID NO: 18463 - RNA, 231 nt, unidentified
  source 1..231: mol_type = other RNA; note = Related to NZ_QGGO01000002.1; note = Arcicella aurantiaca
gcaaagagaaaaacacaaagaccttgcattccgaaaggaaagaacgatgtttcgtcgttcgtgaaacatgactacacaagcatcactaattcaatctttactgtgagggcaagttaccagtacgcacttttacagtaaaatctccgagaaattaaaagtgcgtactggtaacgccctcttggagttgattgatttagtcctgagtatcttcgaaggtgttttttctctttg

SEQ ID NO: 18464 - RNA, 230 nt, unidentified
  source 1..230: mol_type = other RNA; note = Related to NZ_AUIF01000010.1; note = Runella zeae
gcaaatcaagaaattcaaaatcttgcattccgaaaggaaagaacgatgtttcgtcgttcgtgaaatatgactttacatgcgtcactaaatacaatctttactgtgagggctgcacccccatagggcttttacagtatggcttccttgaagcaaaagcccctatgggggtgcgccctcttggagttgattgatttagtcctgagtatgatcgaagaaaatttcttgaattt

SEQ ID NO: 18465 - RNA, 231 nt, unidentified
  source 1..231: mol_type = other RNA; note = Related to JAGIBF010000018.1; note = Niastella sp.
agagggaaaaagattatgcaccttgcttccgaaaggaaagggcgatgtttcgtcgtccatgcaacatgaactatacatgcatcaccaaatgtaatctttactatggcataccgggtgctatttgcttttagcagtacaggcccgttgtgccctaaaagcaaatagcacccggtatgccttgcgttgattaatctggtcaccggcgtgcacgaaggcagcatgatttccctc

SEQ ID NO: 18466 - RNA, 232 nt, unidentified
  source 1..232: mol_type = other RNA; note = Related to NZ_JAARML010000006.1; note = Paraflavitalea devenefica
acagagggaaaaaagatgcaccttgcttccgaaaggaaagggcgatgtttcgtcgtccatgcaacatgaactattcatgcatcaccaaatgtaatctttactatggcataccggctaccagtgcaatttatcagtactggcactgtgtgccttaaattgcactggtagccggtatgcctggcgttgattaatctggtcaccggcgcgcacgaaggcagcatgcttccctctg

SEQ ID NO: 18467 - RNA, 230 nt, unidentified
  source 1..230: mol_type = other RNA; note = Related to NZ_CP032157.1; note = Paraflavitalea soli
agagggaaaaaagatatgcaccttgcttccgaaaggaaagggcgatgtttcgtcgtccatgcaacatgaatatttcatgcatcaccaaatataatctttactatggcatacacactaccggtcaactatatcagtgccggcactgtgtgccatatagttcaccggtagtgtgtatgcctggcgttgattaatctggtcaccggcgagcacgaaggcagcattattccctc

SEQ ID NO: 18468 - RNA, 230 nt, unidentified
  source 1..230: mol_type = other RNA; note = Related to NZ_LVYD01000013.1; note = Niastella vici
agagggtaaaattacatgcaccttgcttccgaaaggaaagagcgatgtttcgtcgctcatgcaacatgaatatttcatgcatcaccaaatgtaatctttactatggcatataggtaccagtgtgcaattatcaggactggcactatgtgccttaattgcacactggtacccatatgccttgcgttgattaatctggtcactggtgtgcacgaaggcagcatgcttccctc

SEQ ID NO: 18469 - RNA, 231 nt, unidentified
  source 1..231: mol_type = other RNA; note = Related to NZ_LWBP01000254.1; note = Niastella populi
gaggggaaataattacatgcaccttgcttccgaaaggaaagagcgatgtttcgtcgctcatgcaacatgaatatttcatgcatcaccaaatgtaatctttactatggcatataggtaccagtgtactattttcagtaccggcactatgtgcctaaatagtacactggtacccatatgccttgcgttgattaatctggtcaccggtgtgcacgaaggcagcatgtttctcct

SEQ ID NO: 18470 - RNA, 233 nt, unidentified
  source 1..233: mol_type = other RNA; note = Related to JAKLTR010000008.1; note = Terrimonas sp.
tgacggggttgatgtatgcaccttgcttccgaaaggaaagaacgatgtttcgtcgttcatgcgacatgaatagttcatgcatcaccaaatgtaatctttactgtggcatacgggcctatatgtactggttaacagtacaggcaccgtgtgccaaaccagtacatataggcccgtatgcctggcgttgattaatctggtctcaggcacgcacgaaggaatacataaaccccgtc

SEQ ID NO: 18471 - RNA, 232 nt, Citrobacter sp.
  source 1..232: mol_type = other RNA; note = Related to QFQQ01000068.1; note = Citrobacter freundii
gacaggggtaatgcagcaccttgcttccgaaaggaaagaacgatgtttcgtcgttcatgcaacatgaatagttcatgcatcaccaaatataatctttactgtggcatacgggtactataccgctggttttcagttccaagccccgtgtgccaaaccagcggtatagtacccgtatgcctggcgttgattaatctggtctcgggcacgcacgaaggcagcacattatccccgt

SEQ ID NO: 18472 - RNA, 231 nt, unidentified
  source 1..231: mol_type = other RNA; note = Related to JAFLBL010000017.1; note = Chitinophagales bacterium
agagggtcgtttggcattgcaccttgcttcctgaaaaggaaagaacgatgtttcgtcgttcatgcaacatgactcgttcatgcatcaccaaatgtaatctttactatggcatacacgtaccagtgtacctttcccggtgcaggcacgtggtgccataatggtacactggtacgtgtatgcctggcgttgattaatttggtccgcggcaggcacgaaggcgcagccaccctc

SEQ ID NO: 18473 - RNA, 229 nt, unidentified
  source 1..229: mol_type = other RNA; note = Related to AP017422.1; note = Filimonas lacunae
gagatggtaaagtaaaggcaccttgcttccgaaaggaatgagcgatgtttcgtcgttctggttcaatgagtttctcatgcatcaccaaatgtaatctttactatggccggggggtaccgtatcaccattatcagtgatggccccgtgtgccataatagtgatacggtaccccccggcctggcgttgattaatctggtcccgggcgggcacgaaggcagccttaccatct

SEQ ID NO: 18474 - RNA, 231 nt, unidentified
  source 1..231: mol_type = other RNA; note = Related to NZ_BMIB01000004.1; note = Filimonas zeae
acagaaagatggtaatgcaccttgcttccgaaaggaaagagcgatgtttcgtcgttcaggtacaatgactttgtcatgcatcaccaaatataatctttactatggcccgggggtactatctcaccattatcggtgtaggccccttgtgccagaatagtgagatagtacccccgggcctggcgttgattaatctggtccccggcgtgcacgaaggcagctgccatctttctg

SEQ ID NO: 18475 - RNA, 205 nt, unidentified
  source 1..205: mol_type = other RNA; note = Related to NZ_VVIP01000043.1; note = Proposed Foetidibacter luteolus
atgcaccttgcttccgaaaggaaagagcgatgtttcgtcgctcatgcaaaatgagtttctcatgcatcaccaaatgtaatctttactatggccacagggtgctatatcactatttacagtgaaggccccgtgtgcctaaataatgatatagcaccctgtggcctggcgttgattaatctggtcccgggcaggcacgaaggcagca

SEQ ID NO: 18476 - RNA, 229 nt, unidentified
  source 1..229: mol_type = other RNA; note = Related to JAHBTJ010000009.1; note = Chitinophagaceae bacterium
acagagagatggcgttgcaccttgcttccgaaaggaaagaacgatgtttcgtcgttcatacagcatgactaatacatgcatcaccaaatgtaatctttactatggcctacacgtaccagtgtaccattttcggtaccggcactgtgtgccataatagtacactggtacgtgtaggccttgcgttgattaatctggtcagggcaggcacgaagggcggcgcctctctctg

SEQ ID NO: 18477 - RNA, 227 nt, unidentified
  source 1..227: mol_type = other RNA; note = Related to LUKG01000006.1; note = Flavihumibacter sp.
acagagagctggcgcagcaccttgcttccgaaaggaaagaacgatgtttcgtcgttcatacagcatgaccagtacatgcatcaccaaatgtgatctttactatggcatatatgtacctatgtactattttcagtacaggcactatgtgccataatagtacataggtacatatatgccttgcgttgatcaatctggtctgggcaggcacgaagggccgccgctctctg

SEQ ID NO: 18478 - RNA, 211 nt, unidentified
  source 1..211: mol_type = other RNA; note = Related to NZ_JACYFG010000060.1; note = Pelagicoccus enzymogenes
cgaaggcgatcctggctttgcaacccgagcggcgtatcgccgttcatgcacacagcctagcatcgcttcactggaacggtcgtcactgtgcgaacacgcataggtgtgtcgtttacagtgccgaccctgcgggtctaaacagacacacctatgcgtgttcgcttgagttgaccgcaccagtcataagagtacgcgaaagtcaggcgccttc

SEQ ID NO: 18479 - RNA, 222 nt, unidentified
  source 1..222: mol_type = other RNA; note = Related to JAGROY010000010.1; note = Verrucomicrobiae bacterium
cagtggcggggcgttgcaccttgcgatttgggcggcggatcgccgtccatgcccatagactagcaacgcaccactggcccgctcttgactgtgcgaggcatccgcccggtgtgcgcttttcggtgcagatccgggggatcaaaagcgcacaccgggcgggcctcgctggagttgaccgctccagtcctgagacctgcacgaaggcaataccgccccgccact

SEQ ID NO: 18480 - RNA, 221 nt, unidentified
  source 1..221: mol_type = other RNA; note = Related to NZ_CP025791.1; note = Flavivirga eckloniae
tggtagtgataagataaaaaccttgcattttgattggtggatcgccaatcttgcacacagataccgaacgcgtcactgactcgaacttaacttgtgaaataggtactagtgtactatttccggttagacttctgcgaagtgaaataatacactagtacctatttcactggagttgttcaattcagtcttgagaatcgtacgaaggcatacaaaatacatct

SEQ ID NO: 18481 - RNA, 222 nt, unidentified
  source 1..222: mol_type = other RNA; note = Related to SORL01000014.1; note = Algibacter lectus
tggtagtaataagataaaaaccttgcattttgattggtggatcgccaatcttgcttacagataccgaacgcgtcactgactcgaacttaacttgtgaaataggtaccatagtaccatttccggttagacttctacgaagtgaaatagtactatggtacctatttcactggagttgttcaattcagtcttgagaatcgtacgaagggcattcaaaatacatct

SEQ ID NO: 18482 - RNA, 212 nt, unidentified
  source 1..212: mol_type = other RNA; note = Related to NZ_LIQG01000027.1; note = Lacinutrix mariniflava
aagataaaaaccttgcattttgattggtgtatcgccaatcttgcttaaagacaccgaacgcgtcactgactcgaacttaacttgtgaaataggtactagtgtactatttccggttagacttctgcgaagtgaaataatacactagtacctatttcactggagttgttcaattcagtcttgagaatcgtacgaagggaattaaatagacatct

SEQ ID NO: 18483 - RNA, 220 nt, unidentified
  source 1..220: mol_type = other RNA; note = Related to NZ_VSDQ01000163.1; note = Seonamhaeicola marinus
cggtagtgataagataaaaaccttgcattttgattggtggatcgccaatcttgcacacagatactgaacgcatcactgactcgaacttaacttgtgaaataggtactatagtactatttccggttagacttctgcgaagtgaaataatactatagtacctatttcactggagttgttcaattcagtcttgagaatcgtacgaagggaacaaaatacatct

SEQ ID NO: 18484 - RNA, 222 nt, unidentified
  source 1..222: mol_type = other RNA; note = Related to WTCE01000070.1; note = Crocinitomix sp.
tggcagtaataagacaaaaaccttgcaattcggttggtggatcgccaatctagcatacagacaccgaacgcatcactgacctgaacttaacttatgaaatagacactagggtgctatttccggttatacttctacgaagtgaaatagcaccctagtgtctatttcattggagttgttcaattcagtctttagaaacgtacgaagggaactgaaaatacgtct

SEQ ID NO: 18485 - RNA, 213 nt, unidentified
  source 1..213: mol_type = other RNA; note = Related to NVRM01000058.1; note = Flavobacteriaceae bacterium
taagataaaaaccttgcaacgtgattggtgtatcgccaatcttgcttacagtttacgaatgcatcactgacttgaacttaacttgtgaaaagggtactatagtaccatttccggttatacttctccgaagtgaaatagtactatagtacccttttcactggagttgttaaattcagtctttggaatagtacgaagggaatttacataggtctt

SEQ ID NO: 18486 - RNA, 222 nt, unidentified
  source 1..222: mol_type = other RNA; note = Related to NZ_OENB01000038.1; note = Tenacibaculum dicentrarchi
tggtagtaataagataacgaccttgcaatttgattggtgtatcaccaatctagcttacagacaccgaacgcgtcactgactcgaacttaacttgtgaaataggtactatagtgccatttcctgttatacttcttcgaagtgaaatagcactatagtacctatttcactggagttgttcaattcagtctttagaattgtacgaagatatatcttattgctacc

SEQ ID NO: 18487 - RNA, 221 nt, unidentified
  source 1..221: mol_type = other RNA; note = Related to NZ_AUMF01000009.1; note = Tenacibaculum ovolyticum
tggtagtaataagataaaaaccttgcaatttgattggtgtatcgccaatctagcttacagacaccgaacgcgtcactgactcgaacttaacttgtgaaattagcactatagcactatttccggttatacttcttcgaagtgaaataatgctatagtgctaatttcactggagttgttcaattcagtctttagagttgtacgaagggaaaaaatatacatct

SEQ ID NO: 18488 - RNA, 221 nt, unidentified
  source 1..221: mol_type = other RNA; note = Related to NZ_CP053348.1; note = Winogradskyella forsetii
tggtagcaataagataaaaaccttgcattttgattggtggatcgccaatcttgtttacagacaatgaacgcgtcactgactcgaacttaacttgtgaaataggtaccatagtactgtttccggttagacttctacgaagtgaaacagtactatggtacctatttcactggagttgttcaattcagtctttagagtcgtacgaagggaattaaaatacatct

SEQ ID NO: 18489 - RNA, 215 nt, unidentified
  source 1..215: mol_type = other RNA; note = Related to NZ_CP009976.1; note = Cellulophaga baltica
aataagataaaaaccttgcattttgattggtggatcgccaatcttgtttacagacaatgaacgcgtcactgactcgaacttaacttgtgaaataggtactagtgtaccatttccggttagacttctatgaagtgaaatagtacactagtacctatttcactggagttgttcaattcagtctttagagtcgtacgaagggaaaaaatacatcttat

SEQ ID NO: 18490 - RNA, 215 nt, unidentified
  source 1..215: mol_type = other RNA; note = Related to BMWS01000013.1; note = Aquimarina muelleri
ataagagagaaaaccttgcattttgattggtggatcgccaatcctgcatacagacactaaacgcgtcactggctcgaacttaacttgtgaaataggtactatagtgccatttccggttagacttctacgaagtgaaatagcactatagtacctatttcactggagttgttcaatccagtctttagaattgtacgaagggaataaaatacatctta

SEQ ID NO: 18491 - RNA, 220 nt, unidentified
  source 1..220: mol_type = other RNA; note = Related to NZ_QMFY01000006.1; note = Chryseolinea flava
cggtagcagcaggatattaagacttgcaacccgggtggtggatcaccatccttgtacacagcttgctaacgcgccactggctcgttcttgactgtgcgatcctcgtactagtgtaccattcccggtgtgaaatctgaggaattgaaatagtacactagtacggtctcgcttgagttgaccgttccagtcctcaggatgacgaaggatatccgctgctacc

SEQ ID NO: 18492 - RNA, 217 nt, unidentified
  source 1..217: mol_type = other RNA; note = Related to JAIOAO010000004.1; note = Fulvivirgaceae bacterium QH1ED-6-2
gtagcagcaggatatcaaaaacttgcaatccgggtggtggatcaccatccttgtacacagcttactaacgcgccactggctcgttcctgactgtgcgatcctgcgaccatacgcacattttcggtgtgaaatctgaagaatttaaatgtgcgtatggtcgcgtctcgcttgagttgaccgttccagtcctcagcttgacgaagtatatccgctgcta

SEQ ID NO: 18493 - RNA, 217 nt, unidentified
  source 1..217: mol_type = other RNA; note = Related to JAERRB010000002.1; note = Chryseolinea sp.
gtagcagcaggatattaaaaccttgcaacccgggtggtggatcaccatccttgtacacagcttactaacgcgccactggctcgttcttaactgtgcgatcctgcaccagtacgcctatttccggtgtgaaatctggagaatttaaataggcgtactggtgcgtctcgcttgagttgaccgttccagtcctcagcatgacgaaggatatccgctgcta

SEQ ID NO: 18494 - RNA, 220 nt, unidentified
  source 1..220: mol_type = other RNA; note = Related to QFQN01000037.1; note = Azospira oryzae
tagcagcagagggtattatgacttgcaacccgggcggtggatcaccgtccttgtacacagcttactaacgcgccactggcccgttcttaactgtgcgatcctgccactaccccgtcattcccggtgcgaattctgggaattggaataacggggtagtggcgtctcgctggagttgaccgatccagtcctccgaaagacgaaggatatcctcgctgctact

SEQ ID NO: 18495 - RNA, 218 nt, unidentified
  source 1..218: mol_type = other RNA; note = Related to NZ_KE384560.1; note = Sporocytophaga myxococcoides
gtagtggcagggtattaaaatcttgcaacccgggctgtgtatcacagtccttgtacacagcttactaacgcgccaccggctcgttcttaactgtgcgatcctgccactatatgctcatttccggtgagaattccaggaattgaaataagcatatagtgacgtctcgctggagttgaccaatccggtcctcagaatgacgaagaatatcctgtacacta

SEQ ID NO: 18496 - RNA, 217 nt, unidentified
  source 1..217: mol_type = other RNA; note = Related to JAJTHV010000105.1; note = Flammeovirgaceae bacterium
tagcagacgagggtattaagacttgcaacccgggcggtgtatcaccgtccttgtacacagcttgctaacgcgccactggcccgttcttaactgtgcgatcctgcaacctacacactatttccggtgcgaattccgggaattgaaataatgtgtaggttgcgtctcgctggagttgaccgctccagtcctgagtatgacgaagtgtaccctcgctgct

SEQ ID NO: 18497 - RNA, 215 nt, unidentified
  source 1..215: mol_type = other RNA; note = Related to NZ_FUZU01000002.1; note = Ohtaekwangia koreensis
gtagcggaagggtataaaaaccttgcaatccgggcggtgtatcaccgtccctgtacacagcttactaacgcgccactggcccgttcttaactgtgcgatcctgctaccagtacgtcatttccggtgcgaattccgggaattgaaataacgtactggtagcgtctcgcttgagttgaccgatccagtcctcagcatgacgaaggtatcctccgcta

SEQ ID NO: 18498 - RNA, 215 nt, unidentified
  source 1..215: mol_type = other RNA; note = Related to NZ_JAFEWE010000006.1; note = Pedobacter sp.
tagtgaggcaggccgaaagaccttgcactccgggcggtggatcaccgtccttgcatacagcttagtaacgcgccaccggcctgttcttaactgtacgatcctggtaccatagtgatatttccggtgcaaatccggaggattgaaatatcactatggtaccgtctcgcttgagttgaccaatccggtcctcagaatgacgaaggtgcctcctcact

SEQ ID NO: 18499 - RNA, 220 nt, unidentified
  source 1..220: mol_type = other RNA; note = Related to JAJNDK010000004.1; note = Bacteroidetes bacterium
ttggaaggcgcaggcaaacatcttgcaacccgaacagtggatcgctgttcatgccaacagattagtaatgcatcactggtctgttctttactgtgcggtactgcatccagtacgccatttccggtgagacttcccggaagtgaaatagcgtactggatgcgtaccgcttgagttgaccaacccagtcctcaaagtgaacgaagaaagccctgcccttcca

SEQ ID NO: 18500 - RNA, 217 nt, unidentified
  source 1..217: mol_type = other RNA; note = Related to JAFDXR010000011.1; note = Bacteroidetes bacterium
tggaagaggcagtattacatcttgcaacccggttcgtgtatcgcgatccatgccaacagctcagtaacgcatcactggcctgttctttactttgcaatactgcacctactgtatcatttccggtgagacttcccggaagtgaaataatacagtaggtgcgtattgcttgagttgaccaatccagtcctcaagtagtacgaagaaaactgcctcttcc

SEQ ID NO: 18501 - RNA, 218 nt, unidentified
  source 1..218: mol_type = other RNA; note = Related to CP004371.1; note = Flammeovirgaceae bacterium 311
aggcagcagcaggagaaaaacttgcaatctgagcggcggatcgccgctccggcatacagcaatgcaacgcgtcactggcgcgttcttaacggtgcaccccatctatatgtatgccatttccggtgccacatcggagatgtgaaatagcatacatatagcggggtgcttgagttgaacactccagtcctgtgagtgtacgaagtagacctgctgctgct

SEQ ID NO: 18502 - RNA, 192 nt, unidentified
  source 1..192: mol_type = other RNA; note = Related to DF820455.1; note = Candidatus Moduliflexus flocculans
gaaacgcgacccgaacgaatatttgccttcaaaaacaccgcttcccagcttcactggcctgttcgcgactgtgcagagctaacgcctatctgcatttccggcgcaacttcccggaagtgaaattgcagataggcgttgctctgcttgagttgaacagtccagtcctgaggatgttcgaaggatttcgcgatt

SEQ ID NO: 18503 - RNA, 221 nt, unidentified
  source 1..221: mol_type = other RNA; note = Related to PDSK01000128.1; note = candidate division KSB3 bacterium
ttagagcggtgggggacattcttgcagatgggcgatggatcatcgtccgagcgcatagactgcccatgcttcactggtccgttcgtaactgtgcggagccttcgcctactgtgtcatttccggtgcgacatcggagatgtgaaataacacagtaggcgagctccgcgtgagttgaacgatccagtcctgagagatgtacgaagttctcctctgccgttcta

SEQ ID NO: 18504 - RNA, 220 nt, unidentified
  source 1..220: mol_type = other RNA; note = Related to NZ_BEXT01000001.1; note = Desulfonema ishimotonii
cgacagcggcagggccgtaccttgcattttgggcggcggatcgccgtccgcgcacacagactcgcaacgcaccaccggcccgttcataacggtgcgggacatgcctaccggggcccatttccggtttgacatcggagatgtgaaatagggccccggtaggcgtcccgcttgagttgaacggtccggtcgtcagcctgtacgaaggcgctctgccgctgtc

SEQ ID NO: 18505 - RNA, 222 nt, unidentified
  source 1..222: mol_type = other RNA; note = Related to NZ_JHZA01000001.1; note = Enterovibrio calviensis
tggtagcgcgacgttagaaccttgcatcgcgaatggtggatcaccattctggtacaaagactacccacgcgtcactgaggcaatcttaactgggccgtactgtcacctatatcgctattgcggtatgacttcgaagaagtcaatgagcgatataggtaacgtacggcatcgagttgattccctcagtactaagaactcttcgaaggaagttgtcgcgctacc

SEQ ID NO: 18506 - RNA, 222 nt, unidentified; identical to SEQ ID NO: 18505
  source 1..222: mol_type = other RNA; note = Related to NZ_SCHN01000009.1; note = Enterovibrio sp.

SEQ ID NO: 18507 - RNA, 222 nt, unidentified
  source 1..222: mol_type = other RNA; note = Related to NZ_JMIB01000006.1; note = Photobacterium galatheae
tggtagcgcggcaaaagaaccttgcatcgcgaatggtggatcaccattctggtttaaaggctgcccacgcgtcactggcgcaatcttaactgggccgcacagtcacctatatcgctattgcggtatgacttcgccgaagtcaatcagcgacataggtaacgtgcggcatcgagttgattccgccagtactgagaactcttcgaaggaagtggccgcgctacc

SEQ ID NO: 18508 - RNA, 222 nt, unidentified
  source 1..222: mol_type = other RNA; note = Related to NZ_CP073578.1; note = Photobacterium sp.
tggcagcgcggctccggaaccttgcatcgcgaatggtggatcgccattctggtggaaagactacccacgcgtcactggcccaatcttaactgggccgcacagtcacctatatcgctattgcggtttgacttcgcagaagtcaacgagcgacataggtaacgtgcggcatcgagttgattgcaccagtactgagaactcttcgaaggaagcggctgcgctgcc

SEQ ID NO: 18509 - RNA, 224 nt, unidentified
  source 1..224: mol_type = other RNA; note = Related to BMYC01000011.1; note = Photobacterium aphoticum
acggtagcgcggctaaagaaccttgcatcgcgaatggtggatcaccattctggtttacaggctacccacgcgtcactggtgaaatcttaactgggccgcacagtcacccatatcgctattgcggtatgacttcaaagaagtcaatgagcgatatgggtaacgtgcggcatcgagttgattaccccagtactcagaactcttcgaaggaagacgccgcgctaccg

SEQ ID NO: 18510 - RNA, 221 nt, Vibrio sp.
  source 1..221: mol_type = other RNA; note = Related to PIZL01000001.1
gcagcgcggcagaagaaccttgcctctcgaatggtggatcaccattcaggtataaagactgcccacgcatcactgatgctatctttactgagccgtacagtcacctataccgctattgcggtgtgacttcacagaagtcaatgagcggtataggtaacgtacggcatcgagttgataacctcagtactaagaactcttcgaaggaatatcttgtcgcgctg

SEQ ID NO: 18511 - RNA, 221 nt, Vibrio sp.
  source 1..221: mol_type = other RNA; note = Related to CAOA01000064.1; note = Vibrio nigripulchritudo
gcagcgcggcagaagaaccttgcatctcgaatggtggatcgccattcaggtttaaagactgcccacgcatcactgatgctatctttactgagccgtacagtcacctataccgctattgcggtgtgacttcacagaagtcaatgagcggtataggtaacgtacggcatcgagttgataccctcagtactaagaactcttcgaaggaatatcgcgtcgcgctg

SEQ ID NO: 18512 - RNA, 221 nt, unidentified
  source 1..221: mol_type = other RNA; note = Related to NZ_JAIMJA010000004.1; note = Motilimonas cestriensis
gcaacgcggttgtagaaccttgcatctcgaatggtgtttcgccattctggcacaaagactacccacgcgtagctaatgcaatcttaactgggccgtacagccccctatatcactattgcagtatggcttcaaagaagccaatgagtgatatagggggcgtacggcatcgagttgattgccttagcactgagaactcttcgaaggaaactttcaccgcgttg

SEQ ID NO: 18513 - RNA, 221 nt, Citrobacter sp.
  source 1..221: mol_type = other RNA; note = Related to NZ_CP057483.1
gcggcgtggcaagcgaaccttgcatcccggatggtggatcgccattcaggttttatgactgcccacgcgtcactgatgccatcttcactgggcagagtgtgagtacctgtcactattgcggtatggtttcgaagaaaccaatgagtgacaggtactccactctgcgtcgagtggacgacctcagcaccaggaactcttcgaaggctttttccgccacgccg

SEQ ID NO: 18514 - RNA, 221 nt, Citrobacter sp.
  source 1..221: mol_type = other RNA; note = Related to NZ_CP011132.1; note = Citrobacter amalonaticus
gcggcgtggcaagcaaaccttgcatcccggatggtggatcgccattcaggttttatgactgcccacgcgtcactgatgtcatcttcactgggcagagtgtgagtacctgtcactattgcagtatggcttcaacgaagccaatgagtgacaggtactccactctgcgtcgagtggataacctcagtaccaggaactcttcgaaggccttatccgccacgccg

SEQ ID NO: 18515 - RNA, 221 nt, unidentified
  source 1..221: mol_type = other RNA; note = Related to NZ_HE578945.1; note = Phytobacter massiliensis
gcggcgtggcagtggaaccttgcatcccggatggtggatcgccattcaggttttatgactgcccacgcgtcactgatgccatcttcactgggcagagtgtgagtacctgtcactattgcagtatggcttcaacgaagccaatgagtgacaggtactccactctgcgtcgagtggacgacctcagtaccaggaactcttcgaaggccttatccgccacgccg

SEQ ID NO: 18516 - RNA, 221 nt, unidentified
  source 1..221: mol_type = other RNA; note = Related to NZ_CP051548.1; note = Phytobacter diazotrophicus
gcggcgtggcaaggaaaccttgcatcccggatggtggatcgccattcaggttttatgactgcccacgcgtcactgatgccatcttcactgggcagagtgtgagtacctgtcactattgcagtatggcttcaacgaagccaatgagtgacaggtactccactctgcgtcgagtggataacctcagtaccaggaacgcttcgaaggccttattcgccacgccg

SEQ ID NO: 18517 - RNA, 221 nt, unidentified
  source 1..221: mol_type = other RNA; note = Related to NC_007645.1; note = Hahella chejuensis
gtagcgcgacaaaactaccttgcaatccgagcggtggatcgccgttcttgcttttagacttatcacgcttcactggccagatctttactgggccgtactgcaccacctatcgctattgcggtttggtttctacgaaaccaatgagcgataggtggtgcgtacggcgtcgagttgatcagtccagttctgagaattctacgaagggaaaccatgtcgcgcta

SEQ ID NO: 18518 - RNA, 221 nt, unidentified
  source 1..221: mol_type = other RNA; note = Related to NZ_CP020038.1; note = Agarilytica rhodophyticola
gcagtgcagcaggcctaccttgcaatgcgggcggtggatcgccgtccttgcttatagcctgttcacgcatcactggctcgatctttataatgccgcactgccactactatcgcttttgcggtatggcttctatgaagccaaagagcgatagtagtggcgtgcggcgtcgagttgatcgatccagttctgagaatcctacgaaggaaactcctgctgcactg

SEQ ID NO: 18519 - RNA, 221 nt, unidentified
  source 1..221: mol_type = other RNA; note = Related to NZ_ML660163.1; note = Aliikangiella coralliicola
gtaacgctgaccaacgaccttgcaatctgaatggtggatcgccattcttgcttaaagcctgctcacgcgtcactggtccgctctttactgggcgaggaatgcactaccacgtgcgtttctgtttggctcccctggagcaaacagcacgtggtagtgcatcctcgcgtcgagttgagcggcccagtcctgagaatacttcgaagggaaattcggtcgcgtta

SEQ ID NO: 18520 - RNA, 220 nt, unidentified
  source 1..220: mol_type = other RNA; note = Related to JALJPK010000085.1; note = Pseudomonadales bacterium
gtggcgctgatcaacaaccttgcaatccgaatggtggatcgccattcttgtttacagcctactcacgcatcactagtctgatctttactgggcgtaatagtgcccccataaacgtttcagtttggctccgcaggagcaaactgtttatgggggcactattacgcatcgagctgatcagaccagtcccgagaattctacgaagggaaattcgatcgcgtca

SEQ ID NO: 18521 - RNA, 222 nt, unidentified
  source 1..222: mol_type = other RNA; note = Related to NZ_CP048878.1; note = Spartinivicinus ruber
gtagtgtagtagagcaactaccttgcgttatgagcggtggatcgccgttcttacttaatgacagcccacgcatcactggcttgctcttaactgggccgaacatacactactatcactattgcggtatggcttccctgaagcgaatgagtgatagtagtgcagttcggcgtcgagttgagcaatccagtcttcaggattctacgaaggctgctcgctgcgcta

SEQ ID NO: 18522 - RNA, 221 nt, unidentified
  source 1..221: mol_type = other RNA; note = Related to NZ_SUNB01000001.1; note = Pleionea sediminis
ttggaaagcgtgaagaactttgcatctcggttggtggatcgccaacctggcttcaagacctctcatgcttcactgaccagctctttactgggcggaagatgccctactatcgctattgcagtatgacttcggtgaagtcaatgagcgatagtagggcacttccgcgtcgagttgagcagttcagttctaagaactctacgaaagcactattgcgctttcca

SEQ ID NO: 18523 - RNA, 212 nt, unidentified
  source 1..212: mol_type = other RNA; note = Related to CP059265.1; note = Candidatus Thiothrix singaporensis
aacaagtaaatgaaccttgcattttgaatagtggatcgctattcacgcatagagcctcgcaaagcatcatcagcttgctctttactaaggcggggactgcctactagtgcgaattgcattgggtttctaggaaaccaatatcgcactagtaggcgtccccgcatcgagtgtagcaagctgatcttctgcctgaacgaaggtcatttacctgt

SEQ ID NO: 18524 - RNA, 208 nt, unidentified
  source 1..208: mol_type = other RNA; note = Related to NZ_FNQP01000009.1; note = Thiothrix caldifontis
acagtaaatgaacccttgcctattgaacagtggatcgctgttcacgcaaaaagcctgtcaaagcgacatcagcttgctctttactagggcggggactgacgggtagtgcgaattgcattgcgtttctaggaaaccaatatcgcactacccgtcgtccccgcatcgagtgtagcaagctgatcttctggatgaacgaaggtatttactg

SEQ ID NO: 18525 - RNA, 216 nt, unidentified
  source 1..216: mol_type = other RNA; note = Related to SSFA01000023.1; note = Thiothrix sp.
ataacacgtaaatgaactttgcaatccgaatagtggatcgctattcctacacacagcctagcaaagcctcattaacttgctctttactaaagctcgggctcgctaccatcacgttttgcatagcgtttctaggaaaccaacaacgtgatggtagcggcccgagcatcgagtgtagcaagctaattttctgaatgaacgactgtcatttacgttata

SEQ ID NO: 18526 - RNA, 219 nt, unidentified
  source 1..219: mol_type = other RNA; note = Related to JAKIVF010000151.1; note = Methylococcaceae bacterium
ttagattaagcaaatgagccttgcaacccgaatagtggatcgctattcatgcatacagcctagcaacgcgtcattaacttgctctttactaaagcgggatcgcactactagtacgcattactatttcgtttcttggaaactaataagcgtactagtagtggatcccgcatcgagtgtagcaagctaattgtttgattgagcgaaggtatttgcttactg

SEQ ID NO: 18527 - RNA, 206 nt, unidentified
  source 1..206: mol_type = other RNA; note = Related to QOAQ01000092.1; note = Aquificaceae bacterium
aagcaaatgagccttgcaacccgaatagtggatcgctattcatgcacatagcctagcaacgcatcattaacttgctctttactaaagcgctatctcgctatctatacgcattacgatttgatttctaggaaattaatagcgtatagatagcggatagcgcatcgagtgtagcaagctaattgtttgattgagcgaaggtatttgct

SEQ ID NO: 18528 - RNA, 219 nt, unidentified
  source 1..219: mol_type = other RNA; note = Related to JADMKE010000002.1; note = Candidatus Sericytochromatia bacterium
tgctagggcacaagccggaaccttgcattatgaatcgtggatcgcgattcttgtccacagtgtggccatgcatcatgtacttgctcttcactatagcggccctgccctaccagagtgcatgtacgggatcctttcagggaaagtacatgcacctggtagggcgttccgcatcgagtgtaacaagcacattgtttgatagaacgaaggattgtgcctggc

SEQ ID NO: 18529 - RNA, 244 nt, unidentified
  source 1..244: mol_type = other RNA; note = Related to CP002831.1; note = Saprospira grandis
aggatcaagagaagacaaagtcttgcaaaaagagcgctgtttcggcgttcaagcgatattactcttcactgttcactaaggaagaatctttatgatgcgaaccgtggtaggtgcccctacttgttcccctacgcggtttcgagtcgtagactctgtaggggaacaagtaggggcacctaccacggttcgctggagttgattctcttagttctaagattgtacgaagtaaatcttctctccttct

SEQ ID NO: 18530 - RNA, 238 nt, unidentified
  source 1..238: mol_type = other RNA; note = Related to JABWAJ010000099.1; note = Saprospiraceae bacterium
gcggcggttgctgacaaaaaccttgcaatccggatgctgtttcggcatccatgacacaagaccaggcattcgccggcaaatcgaatcttcatgttgcagccttcggcctacccgggtatctattgcgatcccccggtgttgcgtcgaagacgcggttctcgcaatagatacccgggtaggccgggccgcgggagttgattcgcttgccacgctgatcgtacgaaggtcggcaccgccg

SEQ ID NO: 18531 - RNA, 220 nt, unidentified
  source 1..220: mol_type = other RNA; note = Related to CACVAP010000086.1; note = Sulfurovum sp.
ctagaaagtatgagagaaccttgcaatctgcatagtgtatcgctatgtttgtatagagtctagcaaagcgttattaacctattctttactattacaaataacactactatatgcatatttcgtagtggttttgtaaaaacaaatagtgcatatagtagtgctatttgtgtcgagttgaacaggctaatatttgaacgaacgaagactctcatacttttta

SEQ ID NO: 18532 - RNA, 220 nt, unidentified
  source 1..220: mol_type = other RNA; note = Related to CACVAX010000056.1; note = Sulfurovum sp.
tagaaacataagagaaccttgcaatttgcatggtgtatcaccatgtctgtttagagtctagcaaagcgttattagcatattctttactattacaaatagggtactagtgtacatatttcgtagtagtcttgtaaagacaaatagtgtacactagtaccccatttgtgtcgagttgaatacactaatatttgagtgaacgaagataaactcttttgtttca

SEQ ID NO: 18533 - RNA, 219 nt, unidentified
  source 1..219: mol_type = other RNA; note = Related to DQOI01000098.1; note = Campylobacterales bacterium
ctagaaagtataagagaaccttgcaatccgtatggtgtatcgccatatatgtatagagtctaacaaagcgttattaacacattctttactattacaaatagggtactagtgtatagattcgaagtggtcttgtaaagtcaaatcgtctacactagtaccccatttgtgtcgagttgaatgagctaatatttgaacgaacgaagactcttatacttttta

SEQ ID NO: 18534 - RNA, 222 nt, unidentified
  source 1..222: mol_type = other RNA; note = Related to NZ_QGKL01000042.1; note = Leucothrix arctica
aatgtgatgtgggcaaagaaccttgcaatccgggtggcgtatcgccatccacgcttatagctttgccatgcttcactggtgcattcttaactgggcacccctcactacccatacgcaattacggtataaggtcgttgaccttaatctgcgtatgggtagtgggggtgcttcgagttgaatgccccagtcccgtgtatcgaacgaaggatgcccacatcacat

SEQ ID NO: 18535 - RNA, 223 nt, unidentified
  source 1..223: mol_type = other RNA; note = Related to PDPH01000009.1; note = Proteobacteria bacterium
attgtgatgcgggcactgaaccttgcaaattgtttggtgtatcgccaagcttgcttaaagcaattgtatgcatcactgcctcgctcttgactgggccgaacggtctactgctagtgtcttacgctttaaagccgctggctttaagtacactagcagtagacgttcggcttcgagttgagcgatgcagtcccgagttaatgaacgaaggtcgctcgcatcacag

SEQ ID NO: 18536 - RNA, 230 nt, unidentified
  source 1..230: mol_type = other RNA; note = Related to PTEU01000001.1; note = Ideonella sp.
cgagtgcagcgcgtaggctcttgcaatccgggcggtgtttcgccgcccttgttcactgccgttctatgcgccacgggtgccgtcttcactgtgccgggctgccacccatcgcgcaatgtcaatggggctcgcttcgagcacattggcgcgatgggtggcgcccggcgtcgagtggacagcccccgtccctcaagcctttcaggctcttcgacgagaaacgcgctgcactc

SEQ ID NO: 18537 - RNA, 230 nt, unidentified
  source 1..230: mol_type = other RNA; note = Related to NZ_JAGQDG010000004.1; note = Ideonella paludis
cgagtgcagtgcgctggctcttgcaacccgggcggtgtttcgccgcccttgttcaccgccgttctatgcgccacgggtgccgtcttcactgtgccgggctgccacccatcgcgcaatgccaatcgggctcgcttcgagcacattggcgcgatgggtggcgcccggcgtcgagtggacagcccccgtccctcaagcctttcaggctcttcgacgagaagcgcactgcactc

SEQ ID NO: 18538 - RNA, 230 nt, unidentified
  source 1..230: mol_type = other RNA; note = Related to NZ_QUSW01000004.1; note = Proposed Albitalea terrae
cgagtgcagcgcgttggctcttgcaatccgggcggtgtttcgccgcccttgttgactgccgttctacgcgccacgggtgccgtcttcactgtgccgggctgccacccatcgcgcaatgccgatgtggctcgcttcgagcgcattggcgcgatgggtggcgcccggcgtcgagtggacagcccccgtccctcaagcctttcaggctcttcgatgagaagcgcgctgcactc

SEQ ID NO: 18539 - RNA, 230 nt, unidentified
  source 1..230: mol_type = other RNA; note = Related to RXJW01000018.1; note = Burkholderiales bacterium
cgggtgcagtgcgtgggctcttgcaatccgggcggtgtttcgccgcccttgtgaactgccgttctacgcaccacgggagctgtcttcactgtgccgggctgccacccgtcgcgccatgccgatggggttcgctccgaacgcatgagcgcgacgggtggcgcccggcgtcgagtggacagctcccgtccttcaagccttgcaggctcttcgatgaggagcgcactgcaccc

SEQ ID NO: 18540 - RNA, 230 nt, unidentified
  source 1..230: mol_type = other RNA; note = Related to SCTF01000217.1; note = Aquabacterium sp.
cgagtgcagcgcgcaggctcttgcaacccgggcggtgcttcgccgcccttgctgactgccgttccatgcgccacgggcgccgtcttcactgtgccgcgctgccacccagcgcgcgatgccgatgtgactcccatggagtgcatcggcgcgctgggtggcgcgcggcgtcgagtggacagcgcccgtcctccaagcctttcaggctcttcgacgagaagcgcgctgcactc

SEQ ID NO: 18541 - RNA, 229 nt, unidentified
  source 1..229: mol_type = other RNA; note = Related to VOBQ01000016.1; note = Caenimonas sp.
cgagtgcggtgcgcaggctcttgcaacccgggcgatgtttcgtcgcccatgcagcttgcctttccatgcatcacgggtgccgtcttcactgtggcgcacaccctccggtgcgcaatgccggtgtggcttccgaaaagcacattggcgcaccggagagcgtgcgccgtcgagtggacagcccccgtgccacaagccctgcgggctcttcgacgagaagcgcaccgcactc

SEQ ID NO: 18542 - RNA, 230 nt, unidentified
  source 1..230: mol_type = other RNA; note = Related to CP015118.1; note = Rhizobacter gummiphilus
cgagtgcggtgcgctggctcttgcaacccggacggtgtttcgccgtccttgcccactgccgttccatgcgccacgggcgccgtcttcactgtgccgcactgacacatggtgcgcaatgccgatgtggctccccgggagcgcattggcgcaccatgtgtcgtgcggcgtcgagtggacgtcccccgtcccgggagccttccaggctcttcgacgagaagcgcgccgcactc

SEQ ID NO: 18543 - RNA, 230 nt, unidentified
  source 1..230: mol_type = other RNA; note = Related to JACHYU010000002.1; note = Mitsuaria sp.
cgagtgcagcgcgcaggctcttgcaacccggacggtgtttcgccgtccttgcctcctgccgttccatgcgtcacgggcgccgtcttcactgtgccgcgcagcaccaccgtcgcagattcccatggggcttccctgaagcgaatcgtgcgacggtggtgcgcgcggcgtcgagtggacagcgcccgtccctcaagccttccaggctcttcgacgagaagcgcgctgcactc

SEQ ID NO: 18544 - RNA, 230 nt, unidentified
  source 1..230: mol_type = other RNA; note = Related to NZ_JACHXO010000001.1; note = Roseateles terrae
tgagtgcagcgcgcaggctcttgcaatccgggcggtgtttcgccgtctttgctccctgccgttccatgcgtcacgggcgccgtcttcactgtgccacccagccccaccatgggcatctccgatatggctcccctggagcaatatggcccatggtggggcgggtggcgtcgagtggacagcgcccgtccttcaagcctttcaggctcttcgacgagaagcgcgctgcactc

SEQ ID NO: 18545 - RNA, 232 nt, unidentified
  source 1..232: mol_type = other RNA; note = Related to LMDI01000056.1; note = Rhizobacter sp.
gtgagtgcagcacgtaggctcttgcaacccgggcggtgtttcgccgtccttgctccctgctgttccacgcgtcacgggcgccgtcttcactgtgccgcgctgacacccagtgcgcaatgccggtatggcttgcctcaagcgcattggcgcactgggtgtcgcgcggcgtcgagtggactgcgcccgtcctcgaagcctttcaggctcttcgatgagacacgtgctgcactca

SEQ ID NO: 18546 - RNA, 230 nt, unidentified
  source 1..230: mol_type = other RNA; note = Related to NZ_JAJNKD010000004.1; note = Ideonella azotifigens
cgggtgcagcgcgttggctcttgcaatccgggcgatgtttcgtcgcccttgccaaccgcctgttcatgcgtcacgggtgccgtcttcactgtgccgcgctcgcgccctgtgcgcaattgcggttgggcttgtctcaagccaattggcgcacagggcgcggcgcggcgtcgagtggacagcctccgtcctcggagccccctgggctcttcgatgagaaacgcgctgcaccc

SEQ ID NO: 18547 - RNA, 230 nt, unidentified
  source 1..230: mol_type = other RNA; note = Related to NZ_CP049905.1; note = Diaphorobacter sp.
ccggagcaatgagcaggctcttgcaatccgggcggtgtttcgccgcccttgtgaactgccgtttcatgcaccacgggcgccgttttcactgtgccaccccagccacggtagtgcttttcctgagtggcttgccacaagcgaagcagcactaccgtggcggggtggcgtcgagcgaacagctcccgtcccgtgagccctacaggctcttcgacgagatgcacattgctccg

SEQ ID NO: 18548 - RNA, 230 nt, unidentified
  source 1..230: mol_type = other RNA; note = Related to NZ_CP049910.1; note = Diaphorobacter sp.
ccggagcaacgcgcaggctcttgcaatccgggcggtgtatcgccgcccttgtgaactgccgtttcatgcaccacgggcgccgttttcactgtgccaccccagcgacggtagtgcatttcctgagtggcttgccacaagcgaaactgcactaccgtcgcggggtggcgtcgagcgaacagctcccgtcccgtgagccttacaggctcttcgacgagatgcacgttgctccg

SEQ ID NO: 18549 - RNA, 219 nt, unidentified
  source 1..219: mol_type = other RNA; note = Related to NZ_CP060783.1; note = Diaphorobacter aerolatus
tcaacgcgcaggctcttgcaatccgggtggtgtttcgccgcccatgtgaactgccgtttcatgcatcacgggcgccgttttcactgtgccaccccagccacggtagtgcatttcctgagtggcttgctacaagcgaagctgcactaccgtggcggggtggcgtcgagcgaacagctcccgtccgtgagcctttcaggctcttcgacgagaagcgcgctg

SEQ ID NO: 18550 - RNA, 230 nt, unidentified
  source 1..230: mol_type = other RNA; note = Related to NZ_CP060714.1; note = Diaphorobacter sp.
tcggagcaacgcgcaggctcttgcaatccggacggtgcttcgccgtccatgtgaactgccgtttcatgcaccacgggcgccgttttcactgtgccaccccagccatggtgtcgcgcttcctgagtggcttgccacaagcgaagcagcgacaccatggcggggtggcgtcgagcgaacagctcccgtcccgtgagcccgacgggctcttcgacgagaagcgcgttgctccg

SEQ ID NO: 18551 - RNA, 230 nt, unidentified
  source 1..230: mol_type = other RNA; note = Related to CP065748.1; note = Delftia lacustris
gcggagcgacgcgcaggctcttgcaacccgggtggtgtttcgccacccttgtgaactgccgtttcatgcaccacgggcgccgttttcactgtgccaccccagcgacggtatgcgttttcctgagtggcttgccacaagcgaaacacgcataccgtcgcggggtggcgtcgagcgaacagctcccgtcccgtgagccctgcgggctcttcgacgagaagcgcgtcgctcca

SEQ ID NO: 18552 - RNA, 230 nt, unidentified
  source 1..230: mol_type = other RNA; note = Related to NZ_CP069318.1; note = Delftia lacustris
gcggagcgacgcgcaggctcttgcaacccgggtggtgtttcgccacccttgtgaactgccgtttcatgcaccacgggcgccgttttcactgtgccaccccagcgacggtatgcgttttcctgagtggcttgctacaagcgaaacacgcataccgtcgcggggtggcgtcgagcgaacagctcccgtcccgtgagccctgcgggctcttcgacgagaagcgcgtcgctcca

SEQ ID NO: 18553 - RNA, 230 nt, unidentified
  source 1..230: mol_type = other RNA; note = Related to NZ_LR813084.1; note = Delftia tsuruhatensis
gcggagcaacgcgcaggctcttgcaatccgggtggtgtttcgccgcccttgtgaactgccgtttcatgcaccacgggcgccgttttcactgtgccaccccagcgacggtatgcgttttcctgagtggcttgccacaagcgaagcacgcataccgtcgcggggtggcgtcgagcgaacagcgcccgtcccgtgagccttgcaggctcttcgacgagaagcgcgttgctcct

SEQ ID NO: 18554 - RNA, 230 nt, unidentified
  source 1..230: mol_type = other RNA; note = Related to NZ_AUCQ01000016.1; note = Comamonas composti
gcggagcaacgcgcaggctcttgcaatccgggtggtgtttcgccacccatgtgaactgccgcttcatgcaccacgggcgccgttttcactgtgccaccccagtggtggtagtgcatttcctgagtggcttgccacaagcgaagctgcactaccaccacggggtggcgtcgagcgaacagctcccgtcccgtgagcctttcaggctcttcgacgagaagtgcgttgctcca

SEQ ID NO: 18555 - RNA, 230 nt, unidentified
  source 1..230: mol_type = other RNA; note = Related to NZ_SSWX01000040.1; note = Lampropedia aestuarii
tcggagcaacgcgcaggctcttgcaatccgggcggtgtttcgccgcccatgctctctgccgttctatgcaccacgggcgccgttttcactgtgccaccccagtcatggtgtcgcgcttcctcagtggcttgccacaagcgaagctgcgacaccatgacggggtggcgtcgagcgaacagctcccgtcccgtgagcccgatgggctcttcgacgagaagcgtgttgctccg

SEQ ID NO: 18556 - RNA, 230 nt, unidentified
  source 1..230: mol_type = other RNA; note = Related to NZ_CAKAKO010000003.1; note = Xenophilus sp.
gcgatgcagcgcgcaggctcttgccatccgggtggtgtttcgccgcccttgtgaactgccgttccatgcgacacgggtgccgttttcactgtgcggcccctgccacccatgcgccattccggagtggcttgctgcaagcgaatgcgcgcatgggtggcggggccgcgtcgagtgaacagcccccgtcccgagggccctgcgggctcttcgacgagaagcgcgctgcatca

SEQ ID NO: 18557 - RNA, 230 nt, unidentified
  source 1..230: mol_type = other RNA; note = Related to SEAX01000108.1; note = Comamonadaceae bacterium
ccgatgcaacgcgcaggctcttgcaatccgggcggtgcttcgccgcccttgtgaactgccgttccatgcgacacgggtgccgttttcactgtgcggcccctgccacccatgcgccattcctgagtggcttgctgcaagcgaatgcgcgcatgggtggcggggccgcgtcgagtgaacagcccccgtcccgagggccctgcgggctcttcgacgagaagcgcgttgcatca

SEQ ID NO: 18558 - RNA, 230 nt, unidentified
  source 1..230: mol_type = other RNA; note = Related to NZ_CP021455.1; note = Comamonas serinivorans
ttcgtgcaacgcgcaggctcttgcaacccggacggtgtttcgccgtccatgacctttgccgtttcatgcgccacgggggaccgttttcactgtgccgaacattggcctgctgtgcacttacgaagaggcttgcgacaagccaattgcacagcaggccaagttcggcgtcgagtgaacagcccccgtcccgtgagccttgcaggctcttcgacgagaagcgcgttgcacga

SEQ ID NO: 18559 - RNA, 223 nt, unidentified
  source 1..223: mol_type = other RNA; note = Related to CP028324.1; note = Massilia armeniaca
gcaagcatggcgggatggctcttgcaacccggacggtggatcgccgtcctcgtaccttgccctccccatgcgtcactggcccgctcttcactgtgccggaccagcactggtagcgcgagtcggtgtgaattccctgaattacatcagcgctaccagtgcggtccggcgtcgagttgagcggtccagtcctgccggcccttcgatgacggttccgccatgcttg

SEQ ID NO: 18560 - RNA, 223 nt, unidentified
  source 1..223: mol_type = other RNA; note = Related to NZ_CP038026.1; note = Massilia plicata
gcaagcatggcgggacggctcttgcaacccggacggcggatcgccgtcctcgtattcagccctccccatgcgtcactggcccgctcttcactgtgccagaccagcactggtagcgcgagtcggtgtgaattccctgaattacatcagcgctaccagtgcggcctggcgtcgagttgagcggtccagtcctgccggcccttcgatgacggtcccgtcatgcttg

SEQ ID NO: 18561 - RNA, 221 nt, unidentified
  source 1..221: mol_type = other RNA; note = Related to CP040017.1; note = Massilia umbonata
caagcatggcgcgatggctcttgcaacccggacggcggatcgccgtcctcgtatcctgctccccccatgcgccactggcccgctcttcactgggccggaccagcgctggcagcgcgagtcggtgtgaatcccatgaattacgccagcgctaccagcgcggtccggcgtcgagttgagcggtccagtcctgccggcccttcgatgacggtcgcgccatgctt

SEQ ID NO: 18562 - RNA, 221 nt, unidentified
  source 1..221: mol_type = other RNA; note = Related to WSES01000020.1; note = Massilia sp.
caggtgcggcgggatggctcttgcaaaccggacggtggatcgccgtccacgtattcagccctccccatgcgtcactggcgcgctcttcactgtgccaaactgacgccggtagcgcgagtcggtgtgaattcgccgaattacgtcagcgctaccggcgtcgtttggcgtcgagttgagcgcgccagtcctgccggcccttcgatgacgatcccgccgcacct

SEQ ID NO: 18563 - RNA, 223 nt, unidentified
  source 1..223: mol_type = other RNA; note = Related to BMKG01000047.1; note = Massilia buxea
gcaagcatggcgggatggctcttgcaacccggacggcggatcgccgtcctcgtatcctgctctccccatgcgtcactggcccgctcttcactgggccggaccagcccgggtagcgcgagtcggtgtgaattccatgaattacatcagcgctacccgggcggtccggctacgagttgagcggtccagtcctgccggcccttcgatgacggtcccgccatgcttg

SEQ ID NO: 18564 - RNA, 223 nt, unidentified
  source 1..223: mol_type = other RNA; note = Related to NZ_CP024608.1; note = Massilia violaceinigra
acaagcacggcgggatggctcttgcaaaccggacggcggatcgccgtccacgttgtcagctcttcccacgcgtcactggcacgctcttcactgtgccgtacctgcaccagtagcgcgacacggtttggcttccctgaagccgatcagcgctactggtgcggtacggcgtcgagtggagcgctccagtcctgcaggcccttcgatgattatcctgccgtgcttg

SEQ ID NO: 18565 - RNA, 223 nt, unidentified
  source 1..223: mol_type = other RNA; note = Related to NZ_AUDI01000031.1; note = Pseudoduganella violaceinigra
gcaaacacggcgggatggctcttgcaattcgaacggtggatcgccgttctcgtattcagctcttcccatgcgccactggcacgctcttcacagtgccatacaggccctggtgtggcaagacggtgtgactgcccggcagtccattcgccacaccagggccgtatggcatcgagtggagcgccccagtcttaaaggctcttcgatgacaacccggccgtgtttg

SEQ ID NO: 18566 - RNA, 223 nt, unidentified
  source 1..223: mol_type = other RNA; note = Related to LMFZ01000021.1; note = Duganella sp.
gcaaacacggcgggatggctcttgcaacccgaacggcggatcgccgttcacgtattcagctcttcccatgcgccactggcacgctcttcacagtgccatacagacaccagtgcagcaagacggtgtgactgccctgcagtccattcgccgcactggtgtcgtatggcatcgagtggagcgccccagtcttaaaggctcttcgatgacaatcccgccgtgcttg

SEQ ID NO: 18567 - RNA, 223 nt, unidentified
  source 1..223: mol_type = other RNA; note = Related to NZ_WWCJ01000033.1; note = Massilia guangdongensis
gcaaacacggcgggatggctcttgcaaaccgaacggcgcatcgccgttcacgtattcagctcttcccatgcgccactggcacgctcttcacagtgccatacaggccccggtgtcgcaagacggtgtgactgcccggcagtccattcgcgacaccggggccgtatggcatcgagtggagcgccccagtcctaaaggctcttcgatgacgatcccgccgtgcttg

SEQ ID NO: 18568 - RNA, 219 nt, unidentified
  source 1..219: mol_type = other RNA; note = Related to NZ_NSJF01000005.1; note = Vandammella animalimorsus
cgggcgtacgggcaaggctcttgcatcctgggtggtggatcgccatccgcgttgtttgctctgtcatgcgtcactggcgcactcttcactgtgccgatggcgctacccgccgcttttgccgtttgacttccttgaagtcaaacagcggagggtagcccatcggcgtcgagtggagcgcgcaagtccgaaggcttcttcgatgagaacgcccgtacgccc

SEQ ID NO: 18569 - RNA, 220 nt, unidentified
  source 1..220: mol_type = other RNA; note = Related to NZ_VIRW01000011.1; note = Chitinibacter sp.
atggtgtggtggggaggctcttgcaacccggctggtgcatcgccagccttgtcttttgctgttccacgcgtcactggcctgttcttcactgggccggtacgtgctacctgcgacatgacggtgcggcttgtgccaagcccaatgtcgcaggtagcacgtaccggcttcgagtggaccagtccagtcttacaggctcttcgatgagaaccctgccacaccc

SEQ ID NO: 18570 - RNA, 221 nt, unidentified
  source 1..221: mol_type = other RNA; note = Related to NZ_SCOH01000042.1; note = Chitinivorax sp.
aatgcgtagcggggaggctcttgcaacccggatggcggatcgccattcatgcttaaagctgtcccacgcgtcactggcccgctcttcactgggccggggcgtgctaccagcgacatgacggttcggcttgttccaagctcgatgtcgccggtagcacgccccggctttcgagtggagcagtccagtctacaaggctcttcgatgagaaccccgctacgcac

SEQ ID NO: 18571 - RNA, 221 nt, unidentified
  source 1..221: mol_type = other RNA; note = Related to JAEUND010000226.1; note = Chitinimonas sp.
tcgcgtatggcggggtggctcttgcaacccggacggtggatcgccgtccttgtacctagctgccccacgcgtcactggcctgctcttcactgggccgtaacacacccctagcgccatgacggtgcggcttgtgccaagcccgatggcgctaggggtgcgttacggcttcgagtggaacagtccagtctacaaggctcttcgatgagaaccccgccatcgcg

SEQ ID NO: 18572 - RNA, 221 nt, unidentified
  source 1..221: mol_type = other RNA; note = Related to NZ_KB892857.1; note = Uliginosibacterium gangwonense
gcgcagcagcggggtggctcttgcaacccgggtggtggatcgccgcccttgttttcagccctcccacgcgtcactggcccgctcttcactgtgcgggacagcactacctgtcgcaatggcggttgggcttgctacaagcccattagcgacaggtagtgcgtcccgcgtcgagtggagcgctccagtttgacaggctcttcgatgagaaccctgctgctgcg

SEQ ID NO: 18573 - RNA, 219 nt, unidentified
  source 1..219: mol_type = other RNA; note = Related to NZ_JACOGF010000004.1; note = Undibacterium hunanense
cgaacaaggcaggaaggctcttgcaatccggatggtgtatcgccatccatgtactttgcttagctatgcatcactgagtttctcttcactgtgccggatacgactgctggcgcaatgacgatgtggattccgtgaaccccattcgcgccagcagtcgtatccggcgtcgagtggagcctctcagtctgaaggctcttcgatgagcttcctgcctttttc

SEQ ID NO: 18574 - RNA, 207 nt, unidentified
  source 1..207: mol_type = other RNA; note = Related to JAKZHX010000005.1; note = Undibacterium sp.
aggcaggaaggctcttgcaatccggatggtgtatcgccattcatgtagtttgcttagctatgcatcactgagtttctcttcactgtgccgtatcacactaccggcgcaatgacgatgtggattccgtgaaccccattcgcgccggtagtgcgatacggcgtcgagtggagcctctcagtctgaaggctcttcgatgagcttcctgcc

SEQ ID NO: 18575 - RNA, 218 nt, unidentified
  source 1..218: mol_type = other RNA; note = Related to NZ_QJKB01000012.1; note = Undibacterium pigrum
agattttggcaggaaggctcttgcaatccggatggtgtatcgccatccatgttttttgcttagctatgcatcactgagtttctcttcactgtgccggaaggacataccggcgtgatgacgatgtggattccgtgaaccccatcacgccggtatgtccttccggcgtcgagtggagcctctcagtctgaaggctcttcgatgagcttcctgccgctttc

SEQ ID NO: 18576 - RNA, 222 nt, unidentified
  source 1..222: mol_type = other RNA; note = Related to NZ_RXFT01000001.1; note = Variovorax guangxiensis
gcgaacggagcgggaaggctcttgcaatccggtcggcgtatcgccgccctcgcatacagcacttcccaagcgtcactggacgtctcttcactgtgccggatggccatggtgacgcgacaacagtgcggcttcctcgaagctcatcggcgtcaccatggccatccggcgtcgagtggagccctccagtcccgaggctcttcgacgagattcccgcttcgttcg

SEQ ID NO: 18577 - RNA, 222 nt, unidentified
  source 1..222: mol_type = other RNA; note = Related to NZ_CP060295.1; note = Variovorax sp.
gcgaacggagcgggaaggctcttgcaatccgggtggcgtatcgccaccctcgcacacagcacttcccaagcgtcactggacgtctcttcactgtgccgtaggtgcacggtggcgcgatgacagtgcggcttcctcgaagctcatcggcgccaccgtgcacctacggcgtcgagtggagccctccagtcccgaggctcttcgacgagattcccgccccgttcg

SEQ ID NO: 18578 - RNA, 222 nt, unidentified
  source 1..222: mol_type = other RNA; note = Related to NZ_CP091716.1; note = Variovorax paradoxus
gcgaacggagcgggaaggctcttgcaatccggttggcgtatcgccaccctcgcacacagcacttcccaagcgtcactggacgtctcttcactgtgccgtaggtgcacggtggcgcgacaacagtgcggcttcctcgaagctcatcggcgccaccgtgcacctacggcgtcgagtggagccctccagtcccgaggctcttcgacgagattcccgcttcgttcg

SEQ ID NO: 18579 - RNA, 221 nt, unidentified
  source 1..221: mol_type = other RNA; note = Related to CP063166.1; note = Variovorax paradoxus
gcgaacggggcgggaaggctcttgcaatccggatggcgcatcgccatcctcgatctcagcacttcccaggcttcactggacatctcttcactgtgccgtacgcgcatggtggcgcgatgacggtgcggcttcttcgaagctcatcgcgccaccatgcgcgtacggcgtcgagtggagctgtccagtcctcaggctcttcgacgagattcccgtcccgttcg

SEQ ID NO: 18580 - RNA, 216 nt, unidentified
  source 1..216: mol_type = other RNA; note = Related to NZ_JAGSPN010000003.1; note = Undibacterium luofuense
cagttggcaggaaggctcttgcaacccgaatgatgtttcgtcattcttgcagtatgtcttgttatgcatcactgagccgctcttcactgtgccgtatatgactaccggcgcaatgacgatgcgggttccgtgaacctcattagcgccggtagtcatatacggcgtcgagtggagcttctcagtaccagaggctcttcgatgagcttcctgccctct

SEQ ID NO: 18581 - RNA, 216 nt, unidentified
  source 1..216: mol_type = other RNA; note = Related to NZ_BMYU01000002.1; note = Undibacterium squillarum
cagacggcaggaaggctcttgcaacccgaatgatgtttcgtcattcttgcagtatgtcttgttatgcatcactgagccgctcttcactgtgccgtatatgactaccggcgcaatgacgatgcggggtccgtgaccctcattggcgccggtagtcatatacggcgtcgagtggagcttctcagtaccagaggctcttcgatgagcttcctgccctct

SEQ ID NO: 18582 - RNA, 224 nt, unidentified
  source 1..224: mol_type = other RNA; note = Related to JAFGZG010000009.1; note = Methylobacterium goesingense
ggggcgtcggccggagcggaccttgcaccctgggcggcgcttcgccgtccctgcaccctgcccggcaaagcgtcactggcccgctcttcactgggccggcactgacctcccccgcgcgctttcggtttgggttccttgaacccaagcgcgcgggggaggtcgtgccggcatcgagtggaccgggccagtcccgagacttgacgaaggctttccggccggcgtcc

SEQ ID NO: 18583 - RNA, 224 nt, unidentified
  source 1..224: mol_type = other RNA; note = Related to BPQF01000021.1; note = Methylobacterium bullatum
gggacgtcgggcggagcggaccttgcaacctgggcggcgtttcgccgtccctgcaccctgcccggcaaagcgtcactggcccgctcttcactgggccggcacagacccctaccgcgcgctttctgtttgggttccttgaacccaaacgcgcggtaggggtcgtgccggcatcgagtggaccggaccagtcccgagacttgacgaaggctttccggccggcgtcc

SEQ ID NO: 18584 - RNA, 224 nt, unidentified
  source 1..224: mol_type = other RNA; note = Related to JACHWM010000004.1; note = Methylobacterium sp.
ggggagtcggcgggggcggaccttgcatcctgggcggcgtttcgccgtccctgcaccctgcccggcaaagcgtcaccggcccgctcttcactgggccggcactgaccaccccggcgcgttctcgatttgggttccctgaacccaaacgcgccggggtggtcgtgccggcttcgagtggagcgcgccggtcccgagacttgacgaaggcatcccgaccggcgccc

SEQ ID NO: 18585 - RNA, 224 nt, unidentified
  source 1..224: mol_type = other RNA; note = Related to CP001001.1; note = Methylobacterium radiotolerans
ggggcgccggccggggcggaccttgcatttcgggcggcgattcgccgtccctgcaccctgcccggcaaagcgtcactggcccgctcttcactgggccggcactgaccaccggtgcgcgttcgcggtttgggttcgctgaacccaaacgcgcaccggtggtcgtgccggcgtcgagtggaccgggccagtcccgagacttgacgaaggcatcccggccgacgtcc

SEQ ID NO: 18586 - RNA, 224 nt, unidentified
  source 1..224: mol_type = other RNA; note = Related to NZ_JACJIM010000008.1; note = Methylobacterium fujisawaense
ggggcgtcggccggggcggaccttgcatttcgggcggcgattcgccgtccctgcaccctgcccggcaaagcgtcactggcccgctcttcactgggccggcactgaccaccggtgcgcgttcgcggtttgggttcgctgaacccaaacgcgcaccggtggtcgtgccggcgtcgagtggaccgggccagtcccgagacttgacgaaggcatcctggccgacgtcc

SEQ ID NO: 18587 - RNA, 224 nt, unidentified
  source 1..224: mol_type = other RNA; note = Related to NZ_FOPM01000031.1; note = Methylobacterium gossipiicola
ggggcgtcggcagggacggaccttgcattccgggcggcgtttcgccgtccctgcaccctgcccggcgaagcgtcaccggcccactcttcactgggccggcactgaccaccccggcgcgttctcgatttgggttccttgaacccaaacgcgccggggtggtcgtgccggcttcgagtggagtgcgccggtcccgagacttgacgaagacatcccggtcggcgccc

SEQ ID NO: 18588 - RNA, 224 nt, unidentified
  source 1..224: mol_type = other RNA; note = Related to NZ_CABFVH010000047.1; note = Methylobacterium dankookense
ggggcgccggccggagcggaccttgcactccgggcggcgtttcgccgtccctgcaccctgcccggcaaagcgtcactggcccgctcttcactgggccggcactgaccacccccgcgcgttcccggtttgggttccctgaacccaaacgcgcgggggtggtcgtgccggcttcgagtggaccggaccagtcccgagacttgacgaaggcattccggccggcgccc

SEQ ID NO: 18589 - RNA, 224 nt, unidentified
  source 1..224: mol_type = other RNA; note = Related to NZ_CAKLBV010000001.1; note = Methylobacterium sp.
ggggcgtcgtccggggcggaccttgcatcctgggcggcgtttcgccgtccctgcaccctgcccggcaaagcgtcaccggcccgctcttcactgggccggcactgaccacccggctccgttcgcggtttgggttcgctgaacccaaacggtgccgggtggtcgtgccggcatcgagtggagcgggccggtcccgagacttgacgaaggcatcccggccggcgtcc

SEQ ID NO: 18590 - RNA, 224 nt, unidentified
  source 1..224: mol_type = other RNA; note = Related to NZ_JACHOP010000028.1; note = Methylorubrum rhodinum
ggggcgcctgccggggcggaccttgcatcccgggcggcgtttcgccgtccctgcaccctgcccggcaaagcgtcaccggcccgctcttcactgggccggcactgaccacccggcggcgttcgcggtttgggttcgccgaacccaaacgccgccgggtggtcgtgccggcatcgagtggagcgtgccggtcccgagacttgacgaaggcattccggccggcgtcc

SEQ ID NO: 18591 - RNA, 224 nt, unidentified
  source 1..224: mol_type = other RNA; note = Related to NC_011894.1; note = Methylobacterium nodulans
ggggcgccggccggcgaggaccttgcaacccgggcggcgtttcgccgtccttgcaccctgcccggcaaagcgtcactggcccgctcttcactggggcggcacaggccaccggtgcgggtttacggtttgggttccctgaacccaaacccgcaccggtggccgtgccgccttcgagtggagcgggccagtcccaggacgagacgaaggcgagccgtccggcgtcc

SEQ ID NO: 18592 - RNA, 224 nt, unidentified
  source 1..224: mol_type = other RNA; note = Related to NZ_JAFBCY010000002.1; note = Methylopila capsulata
ggggcgccggacggcgaggaccttgcaacccgggcggcgcttcgccgtccttgcaccttgccccaccacgcgtcactggcccgctcttcactggggcggcgctcgggacctgtgcggtcttacggtttgggttcgttgaacccaagaccgcacaggtcccggcgccgccttcgagtggaccggtccagtcccaggacgagacgaaggcgaaccgtccggcgccc

SEQ ID NO: 18593 - RNA, 224 nt, unidentified
  source 1..224: mol_type = other RNA; note = Related to NZ_JACIDN010000003.1; note = Methylobacterium brachythecii
gggacgcaggcaggacaggaccttgcaacccgggcggcgcttcgccgtccctgcttcttgccctgcaatgcgccactggcccggtcttcactgggggaccccagaccaccggtgcggatttacagtttgggttccttgaacccaaatccgcaccggtggtcggggtcccttcgagtggaccgcgccagtcctcagatgagacgaaggcaacccggcctgcgtcc

SEQ ID NO: 18594 - RNA, 224 nt, unidentified
  source 1..224: mol_type = other RNA; note = Related to NZ_LABY01000112.1; note = Methylobacterium variabile
gggacgcgggctggacaggaccttgcaacccgggcggcgcttcgccgtccctgcaccctgccctgcaatgcgccactggcccggtcttcactgggggaccccaggcccctggtgcggatgtacggtttgggttccttgaacccaaatccgcaccaggggccggggtcccttcgagtggaccgcgccagtcctcagatgagacgaaggcaatccggccggcgtcc

SEQ ID NO: 18595 - RNA, 224 nt, unidentified
  source 1..224: mol_type = other RNA; note = Related to NZ_SNZR01000011.1; note = Enterovirga rhinocerotis
ggggcgccggtcggacaggaccttgcaacctgggcggcgtttcgccgtccctgcaccctgcccggcaaagcgtcactggcccgctcttcactgggggaccccagcccacccgtgcggatttccagtttgggttccttgaacccaaatccgcacgggtgggcggggtcccttcgagtggaccgagccagtcccgagatgagacgaaggcatcccggccggcgccc

SEQ ID NO: 18596 - RNA, 224 nt, unidentified
  source 1..224: mol_type = other RNA; note = Related to VOHA01000021.1; note = Reyranella sp.
ggggcgccagccggagcggaccttgcaacccgggcggcgtttcgccgtccttgcaccctgcctggcaaagcgtcactggcccactcttcactgggccggcacagaccaccgtcgcgcttttgcaatatgggtttctaaaacccaaaagcgcgacggtggtcgtgccggcttcgagtggaccgggccagtccttggatccgacgaaggcatcccggccggcgccc

SEQ ID NO: 18597 - RNA, 224 nt, unidentified
  source 1..224: mol_type = other RNA; note = Related to NZ_LLXZ01000195.1; note = Bradyrhizobium jicamae
agggcgcaggctggtcaggaccttgcaacccgggcggcgtatcgccgtccttgcaccatgaccatgcatgcgtcactggcccgatcttcactgggccggggcagtccacccatccgcaatcgcagaatgggttccttgaacccaattgcggatgggtggacgccccggcgtcgagtggatcgatccagttcttggatgagacgaaggcaatccggcctgcgccc

SEQ ID NO: 18598 - RNA, 224 nt, unidentified
  source 1..224: mol_type = other RNA; note = Related to NZ_LFLZ01000017.1; note = Bradyrhizobium tropiciagri
agggcgcaggccggtcaggaccttgcaacccgggcggcgtatcgccgtccttgcaccatgaccacgcatgcgtcactggcccgatcttcactgggccggggcagtccacccctacgcaatcgcagaatgggttccttgaacccaattgcgtaggggtggacgccccggcgtcgagtggatcgatccagttcttagaagagacgaaggcaatccggcctgcgccc

SEQ ID NO: 18599 - RNA, 224 nt, unidentified
  source 1..224: mol_type = other RNA; note = Related to NZ_CP043489.1; note = Labrys sp.
agggcgcgggccggtcaggaccttgcaacccgggcggcgtatcgccgtccttgctacatgaccgtgcacgcatcactggcccaatcttcactgggcggggactgcctaccggtgcgctattgcagattgggttccttgaacccaatagcgcaccggtaggcgtccccgcttcgagtggattgatccagtccttggatgagacgaaggcagcccggcctgcgccc

SEQ ID NO: 18600 - RNA, 222 nt, unidentified
  source 1..222: mol_type = other RNA; note = Related to NZ_FNFO01000004.1; note = Catalinimonas alkaloidigena
gcagtgacgcagcctccacaccttgcaacccgggcggtggatcgccgtccatgcacgtagctttcgctcgcatcacaggcacactcttgacggtggctggtacactactacccctgattgcagtgtgatttccgggaactcaatgcgtaggggtagtagtgtaccagccttgagttgagtgctcccgtccccagaatgttcgaaggtaggctcgcgtcactg

SEQ ID NO: 18601 - RNA, 221 nt, unidentified
  source 1..221: mol_type = other RNA; note = Related to CADCTQ010000349.1; note = Cytophagales bacterium
cagtgagttcaccaaccgtaaccttgcaaaccgggcggtgcttcgccgtccttgaatacagactacactcgcgtcacaggcctgctcttcactttagcccgtagagggtagtagagagactgcggtgtgacttcgggaagtcaatgctcctctactaccctctacgggcatcgagttgagcattcccgtcccaagaatgtacgaaggtttggtgactcact

SEQ ID NO: 18602 - RNA, 220 nt, unidentified
  source 1..220: mol_type = other RNA; note = Related to JACMKY010000311.1; note = Ferruginibacter sp.
cagtgacctagccaaacagaccttgccaaccgggcggtgcatcgccgtccttgcttacagactaccctcgccccacgggccggctcttgactaagcggtaggcggtaggtgagcctatttcggtgggcattcgtgaatgaaatgatgcccacctaccgcctaccgcctcgagttgagccatcccatcccgagaattgtacgaaggtttggcgaagtcact

SEQ ID NO: 18603 - RNA, 217 nt, unidentified
  source 1..217: mol_type = other RNA; note = Related to JADLDL010000134.1; note = Saprospiraceae bacterium
ttcagttaccgaattcaaaaccttgcaaaccgggcggtgtttcgccgtccatgcacacagacaaatcttgcttcacaggcttgctcttcactatggccggtagatatagtaccggggcttgcggtgtgaattcaggaattcaagactcccggtactatacctaccggcgtcgagttgagcattcctgtcctatgattgtacgaaggtttggtactga

SEQ ID NO: 18604 - RNA, 219 nt, unidentified
  source 1..219: mol_type = other RNA; note = Related to KI932172.1; note = Candidatus Entotheonella factor
cctgcggtgtggtcatagtcttgcctcatgggcggtgtatcgccgtccttgtaacttgacttgacatgcttcactggcccgctctcgactgtgcggagcaatgcctacccaaagccgtcgcggtttggattcggagaatccgacggccctgggttggcgctccgcttgagttgagcgttccagtcctgagtggttttcgaagaccgcaccacgccgtag

SEQ ID NO: 18605 - RNA, 219 nt, unidentified
  source 1..219: mol_type = other RNA; note = Related to PPXO01000342.1; note = Candidatus Entotheonella serta
ccatagtgcggtcgtaagtcatgcctcgtgggcggtgcatcgccgtccttgcaacttgacttcacatgcttcactggcctgctctttactgtgcggagcagtcccaccatggggtgtcgcggtttggattcggagaatccgacaacccccttggtgggcgctccgcttgagttgagcgttccagtcctgagtggttttcgaagaccgcactgcgctatg

SEQ ID NO: 18606 - RNA, 227 nt, Calothrix parasitica
  source 1..227: mol_type = other RNA; note = Related to NZ_AP018227.1
gcgcactaattggttagaaatccttgcaatctggatgatgtatcgtcatccttgtgtatagtccagacacgcatcactagcctgctctttactgtgcggtatctcacctactgggggactttacggtttgacttccgtgaagttaaagttcccccagtaggtggataccgcttgagttgagcagtctagtcctgagatatttacgaaggggataccaataaagtgcg

SEQ ID NO: 18607 - RNA, 221 nt, Calothrix sp.
  source 1..221: mol_type = other RNA; note = Related to NZ_VLKB01000009.1; note = Calothrix desertica
taagcgcgctggtaaagattccttgcaaattgggcggtgtatcgccgtccgtgcattcagtctatacacacatcactagtctactcttgactgtgcggtcttacgactagtaggcgcattcctgtttgacttatataaagtgaatgggcgcctactagtcgtgaccgcttgagttgagtaacctagtccccagagatttacgaagggaaaccagcgcgcaa

SEQ ID NO: 18608 - RNA, 213 nt, Scytonematopsis sp.
  source 1..213: mol_type = other RNA; note = Related to JAHHIC010000071.1; note = Scytonematopsis contorta
agttggtaaaaaaatccttgcaaaccggatggtgtatcgccatccatgcgctgagttataacatgcaatcactagtctactcttgactgtgcggttattcagtactacctccgaatttcggattgacttccaagaagtatatgtcggaggtagtactgaaaccgcttgagttgagtagcctagtcctaagggatttacgaaggggataccagc

SEQ ID NO: 18609 - RNA, 260 nt, Calothrix sp.
  source 1..260: mol_type = other RNA; note = Related to NZ_VLKB01000007.1; note = Calothrix desertica
agctagtcgtaagtattaaccttgcaatccggacgatgtatcatcgtccttgcgctgagtctatacatgcttcactagccagttctttacggcgctccgccacccagtgtcgcggtttggtttctgtaaaaccgacgactctaaatggctaaatcctaacagcacccgagactagcaatcttggtataatgcttgtgggtggctccgctgagtaaaactgtctagtctcgggtgatttacgaaggggtttacaaactagc

SEQ ID NO: 18610 - RNA, 263 nt, Calothrix sp.
  source 1..263: mol_type = other RNA; note = Related to NZ_AP018172.1
tgctagctaaatgtaattaccttgcaacccggacagtgtatcactgtccttgcgctaagttgaaacatgcatcactagcctgctctttacggcgctccgccacccagtgtcgcggtttggtttctgtaaaaccgacgactaactagtagccaacttactcgttagttgccgagatttagatactggttcgataggttggggggtggctccgctgagtagagcagtctagtcctgagaggtttacgaagggtttacaagctaga

SEQ ID NO: 18611 - RNA, 223 nt, Tolypothrix sp.
  source 1..223: mol_type = other RNA; note = Related to NZ_JHEG04000001.1; note = Tolypothrix bouteillei
cttaattgttggtaaaaaatccttgcaatctgggcggtggatcgccgtccgtgcgtttagtttagccatacatcactagcccactcttgactgtgcggtcttacggtactaccatggtattccgggttgacatccatgtagtgaatgacccaggtagtaccgtgaccgctgagttgagttgtctagtcctgagggatttacgaagggaaagccaacttattaa

SEQ ID NO: 18612 - RNA, 214 nt, unidentified
  source 1..214: mol_type = other RNA; note = Related to NZ_JTCM02000014.1; note = Hassallia byssoidea
atttgttgagttgaaaccttgcaatttgggcgatggttcgtcgtccttgcgtttagcctaatcatacatcactagcctactcttgactgtgcggtcttacggaagctatcgctattccggtttgacttctacgaagtgaatgaagcgatagcttccgtgaccgcttgagttgagtagtctagtccagagggatttacgaagggaaaccaacaaa

SEQ ID NO: 18613 - RNA, 223 nt, unidentified
  source 1..223: mol_type = other RNA; note = Related to NZ_JAAKGC010000016.1; note = Aetokthonos hydrillicola
gtttgccgttggtagacaatccttgcaatttgggcggtgcgatcgccgtccttgtgtttagcctatacatgcatcactagcctgctcttaactgtgcggtctttcggcagtaggtcgtattccggtctgacttccgtgaagtgaaagcacgacctactgccgagaccgcttgagttgatcagtctagtccaaaggggtttacgaagggaaagctaacggaaaa

SEQ ID NO: 18614 - RNA, 221 nt, Phormidium ambiguum
  source 1..221: mol_type = other RNA; note = Related to NZ_MRCE01000029.1
ataccagtaggcaccaacaaccttgcattctggacagtggatcgctgtccttgcgcttagtccgcccacgcatcactagcccgctcttgactgtgcctatactcaggtactatcgctattacggtttggtttccgtgaaactaatgagcgatagtacctggtataggctggagttgagcgatctagtcctgagatgtttacgaaggggaaacctactggga

SEQ ID NO: 18615 - RNA, 220 nt, unidentified
  source 1..220: mol_type = other RNA; note = Related to JACJPW010000041.1; note = Planktothrix sp.
acgccagaaggcccaacagccttgcaatccgggcagtggatcgctgtccttgcgtttagttcgatcgcgcatcactagcccgctctttactgtgcgtagtgtcaggtagtatcgctattacggtttggtttccgcgaaactaatgagcgatactacctgcactacgcttgagttgatcggtctagtcctgagatgtttacgaaggggcaacctgatggca

SEQ ID NO: 18616 - RNA, 222 nt, unidentified
  source 1..222: mol_type = other RNA; note = Related to NZ_JACJTV010000005.1; note = Coleofasciculus sp.
cctaatcagttggtaaacagccttgcaatccggacgatggatcgtcgtccttgcgtttagcctagccatgcaccactagcctgctcttaactgtgcggtcattcagggctacccccttttccggtgggacttccctgaagtgtaagaagggggtagccctgagaccgcttgagttgagcaatctagtcctgagatgtttacgaaggggcaaccaactgacag

SEQ ID NO: 18617 - RNA, 223 nt, unidentified
  source 1..223: mol_type = other RNA; note = Related to DOIX01000137.1; note = Cyanobacteria bacterium UBA11153
cggtattcgttggtaaacagccttgcaattcggatggtggatcgccattcatgcgcatagccaaagcacgcatcactagcctgctctttactgtgcctaccccactactacctggtattccggttggactttcttaaagtgaataaaccaggtagtagtggggtaggctggagttgagcaatctagtccagaggggtttacgaaggggcaaccaacgaatagc

SEQ ID NO: 18618 - RNA, 194 nt, unidentified
  source 1..194: mol_type = other RNA; note = Related to NZ_NXIB02000033.1; note = Tychonema bourrellyi
tttgatccttgggggaaagaggtgatttgcgcgcgatcgattagttgagacaagcatcactagccagctcttgactgtgcggggcttcaggtactactgctattgcggtttggcttccgtgaagccaatgagcagtagtacctggccccgctggagttgagcagtctagtcctagggggtttacgaaggggcaa

SEQ ID NO: 18619 - RNA, 221 nt, Oscillatoria sp.
  source 1..221: mol_type = other RNA; note = Related to NZ_KB235948.1
gctaattacgaggtaaacagccttgcaatccgggcggtggatcgccgtccttgcgctcagtccagacacgcatcactagcctgctcttgactgtgcggtcattcgggtactgtcgcaattccagtgtgacttccgcgaagtgaatgagcgacagtacccgagaccgcttgagttgagcagtctagtcctgaggggtttacgaaggggcaaccaaagcttag

SEQ ID NO: 18620 - RNA, 223 nt, Synechocystis sp.
  source 1..223: mol_type = other RNA; note = Related to NZ_ALVU02000001.1
taattttagttggtaacagccttgcaatccggatggtggatcgccatccttgcgtttagttcaagcacgcatcactagctcgatcttgactgtacggtcattcgccctagtacgccctacccggtgggacttccatgaagtgtaaaaggcgtactagggcgagaccgcttgagttgatcgatctagtcctgagaggtttacgaaggggcaaacaactgataat

SEQ ID NO: 18621 - RNA, 222 nt, unidentified
  source 1..222: mol_type = other RNA; note = Related to NZ_MKZS01000001.1; note = Moorena bouillonii
ttccatcagttggtaaacagccttgcaatctgggcggtggatcgccgtccctgcgataagttcaaccacgcatcactagcctgctcgtgactgtgcgggctatcgggtgctatcgctattacggtttcgttttcctaaaactaattagcgatagcacccgagcccgcttgagttgagcagtctagtccgagggagtttacgaaggggtaaccaacggagtgg

SEQ ID NO: 18622 - RNA, 224 nt, unidentified
  source 1..224: mol_type = other RNA; note = Related to JAEUQL010000156.1; note = Blastocatellia bacterium
ttggagagtttgacataagccttgcaatccgggcggtggatcgccgtccatgttttcagtctaagcacgcatcactggtcagctcttcactatgcgggacaatgtctctggtgtagatattccggtgtcgttttcgtaaaccgaatagtctacaccagagacgtcccgcttgagttgagcatgcccagtcctcttgtcttttcgaaggggttgtcaaaactcca

SEQ ID NO: 18623 - RNA, 223 nt, unidentified
  source 1..223: mol_type = other RNA; note = Related to JACMLN010000050.1; note = Anaerolineae bacterium
gcaacgaaagggtgccatgaccttgcaacccggatggtggatcgccatccttgcgctgagtccaagccatgcatcactggttcgctcttgacgttgcggcctaagcgggtagtagtgctattccggtggggcaagcgccttgcgaatgagcactactacccgcagtccgcttgagttgagcaacccagtcctgagttgtttacgaaggaacactctttcgaag

SEQ ID NO: 18624 - RNA, 222 nt, Pseudanabaena sp.
  source 1..222: mol_type = other RNA; note = Related to NZ_ALWB01000094.1
gcagtcataagggcaaacaaccttgcaatccgaatggtggatcgccattcttgcatttagtctaagcgcgcatcactggcttgctcttaactgtgcgtctctcgctactagtgtgttattacggtttggcttccgaaaagctaacgaacacactagtagcggagccgctggagttgagcaatccagtcctgagaggtttacgaaggagtaacctgttgactg

SEQ ID NO: 18625 - RNA, 220 nt, unidentified
  source 1..220: mol_type = other RNA; note = Related to MQTZ01000030.1; note = Leptolyngbya sp.
gtagaggcggaacgtcaaaccttgcaatccggatggtggatcgccatccttgtggttagtctaaacgcgcatcactggcccgctcttaactgtgcgtctctccgggtactatcgctgttacggtgtcgtttccgcgaagctaacgagcgatagtacccgggagccgcttgagttgagcgatccagttccagggggtttacgaaggaaggttccgccagtg

SEQ ID NO: 18626 - RNA, 223 nt, Pseudanabaena sp.
  source 1..223: mol_type = other RNA; note = Related to NZ_KB235911.1
agcgatcgcggggaaaacgaccttgcaatccgggtggtggatcgccatccatgtacttagtctaaacgcgcatcactggctcgctcttgactgtgcgttactcggagtacccatgctattacggtgtagtttccgtgaaactaacgagcacgggtactccggtaccgcttgagttgagcgatccagttctgagaggtttacgaaggggataacccgcgatcgc

SEQ ID NO: 18627 - RNA, 221 nt, Calothrix sp.
  source 1..221: mol_type = other RNA; note = Related to JAAUPE010000002.1
gttacgtgacaaggaaataccgcttgcaaaccggatgatggttcgtcatccatgcacacagtccagtcacacatcactggctcgctcttaactatgcgggtcttcgggtactagttggtattacggtgtgaattccgtaaattcaatgaccaactagtacccggacccgctcgagttgaccgttccagtcctgagaggcttacgaagaggctcccacgtaa

SEQ ID NO: 18628 - RNA, 214 nt, Chamaesiphon minutus
  source 1..214: mol_type = other RNA; note = Related to NC_019697.1
actgtgcggcgcataccacttgcaatccggatgatggatcgtcatccttgcgtttagtctagccacacatcactagcgcgctcttaactgtgccgatatcacctaatacctgctattgcagtgcagactccatgagtccaatgagcaggtattaggtgtatcggctggcgttgagcgagctagtctcgggggtttacgaagaggagccgcacag

SEQ ID NO: 18629 - RNA, 220 nt, unidentified
  source 1..220: mol_type = other RNA; note = Related to JAAUOP010000014.1; note = Synechococcales cyanobacterium CRU_2_2
ctgaatctgttcaaaaaccccttgcaacccgaatggtggatcgccattcatgcagttagtctagccgcgcatcactggcttgctcttaactatgcgggtcttcggggtaccgtcgctattccggtgtggattccacgaatcgaatgagcgacggtaccccggacccgctcgagttgagcaatccagtcctgagaggtttccgaagcggtgaacagattcg

SEQ ID NO: 18630 - RNA, 221 nt, unidentified
  source 1..221: mol_type = other RNA; note = Related to JADEXQ010000025.1; note = filamentous cyanobacterium LEGE 11480
actattccatccatgagtccccttgcaatccgggtggtggatcgccatccatgcagttagtctagccgcgcaccactggcttgctcttaactatgcgggtcttcgccctactgtcgctattccggtgcagattccgtgaatcgaatgagcgacagtagggcggacccgctcgagttgagcaatccagtcctgagaggttcccgaagaggcggatggaaaaa

SEQ ID NO: 18631 - RNA, 223 nt, unidentified
  source 1..223: mol_type = other RNA; note = Related to NC_009925.1; note = Acaryochloris marina
tcggtcagtttaggtttaccccttgcaacccgaatggtgcatcgccattcatgtgattagtctaaacgcgcatcactggcttgctctttactgtgcggggcttcgccctaccatcgctgttacggtttagtttccatgaaactaacgagcgatggtagggcggccccgctcgagttgagcaatccagtccgaagaggtttacgaagaggcgctgaactgaccg

SEQ ID NO: 18632 - RNA, 222 nt, unidentified
  source 1..222: mol_type = other RNA; note = Related to JADJPF010000004.1; note = Blastocatellia bacterium
gtgcaaaagtaaagaacttaccttgcaacccgaatggtggatcgccattcttgtactcagtctagtcacgcttcactagtctgctctttacttttgccggtgctaaccaccggcgggtattccggtttgtgtttcgtaaagtgaataacccgccggtggttgcaccggcatcgagttgagcaagcctagtctttagaactttacgaaggttttgcttttgca

SEQ ID NO: 18633 - RNA, 224 nt, unidentified
  source 1..224: mol_type = other RNA; note = Related to JACQZQ010000027.1; note = Acidobacteria bacterium
tggctaaaatgaaggcttttccttgcaatctggaaggtggatcgctttccttgtcggtagttctgtcatgcttcactagtctgctcttcactattgcccgagctaaggccaggcgcggatttcggtgaggattttataaatctaaatccgcgcctggccttgctcgggcatcgagttgagcaagcctagtccttagaacttttcgaaggtcactcattttagcc

SEQ ID NO: 18634 - RNA, 222 nt, unidentified
  source 1..222: mol_type = other RNA; note = Related to JAIBAN010000080.1; note = Blastocatellia bacterium
ctcctggaccctgaaaaaacccttgcaatccgggcggtggatcgccgcccttgcacatagcctgagcacgcgtcaccggcctgctcgtcactttgcttcacaggacctggtatcgaaattccggtgtggctttcgacaaccaaatgttcaataccaggtcccgtgaagctttagttgagcaagtccggtcctgagagttttcgaaggtatccggttacaggc

SEQ ID NO: 18635 - RNA, 223 nt, unidentified
  source 1..223: mol_type = other RNA; note = Related to JACQXX010000070.1; note = Acidobacteria bacterium
ccaagaaccaaccagattttccttgcaacccggacggtggatcgccgtccttgcgcgcagtttgaaccagcatcactggtctgctcttcactttgcaccctaatgtgctaatagcccaatcccggtttggatgtcccacatcaaatgtgggctattagcacatgggtgcttgagttgagcaagcccagtcctgagaggttttcgaaggaaactggaatttttc

SEQ ID NO: 18636 - RNA, 222 nt, unidentified
  source 1..222: mol_type = other RNA; note = Related to JAFDVL010000054.1; note = Acidobacteria bacterium
cggtcaagcgtgaccaccagccttgcaaaccggacggtggatcgccgtccttgcgctcagttgatgcacgcatcactggcctgctcttgactatgcaagactgcactagctattgctatttcggtgtgtttttcgccaaaagaatgagcaatagctagtgcgtcttgctcgagttgagcaatccagtcctgagagattaacgaaggagtgtcgcggttgact

SEQ ID NO: 18637 - RNA, 219 nt, unidentified
  source 1..219: mol_type = other RNA; note = Related to JAFAZX010000026.1; note = Acidobacteria bacterium
cagggcacgcacgcgggccttgcaacccggacggtggatcgccgtccatgcgcaaagctagggcacgcgtcactggcccgctcttaactgtgcgtagcacgcctgctagcggtattccggattggcttccatgaagcgaatgaccgctagcaggcgtgctacgctcgagttgagcgacccagtcctcaggagttttcgaaggggacgcgggcgcgccct

SEQ ID NO: 18638 - RNA, 222 nt, unidentified
  source 1..222: mol_type = other RNA; note = Related to JABFSD010000364.1; note = Acidobacteria bacterium
gcggccagccactacagaccttgcaacccggtcggtggatcgccgcccatgtgtttagctttgtcacgcttcactggctcgctcttaactgtgcgggtctgcctaccctcacgctattgcggtttgtattccgcgaacaaaatgagcgcgagggtaggcgccccgctggagttgagcgatccagtcctaagaccttttcgaaggaaacaacgtggctggccg

SEQ ID NO: 18639 - RNA, 217 nt, unidentified
  source 1..217: mol_type = other RNA; note = Related to JAFDVJ010000081.1; note = Acidobacteria bacterium
tcgaaaaaacgctctgggacttgcaaaccggacggtgcgatcgccgtccctgccgcttgactgaacacgcttcaccggcttgttcttaacttcggcgaaattccactcctgtcgctgtttcggtcggtattccgcgaataaaactagcgacaggagtagaatttcgcttgagttgaacaatccggtccttcgatttcacgaagacgcgcgtttttcg

SEQ ID NO: 18640 - RNA, 222 nt, unidentified
  source 1..222: mol_type = other RNA; note = Related to JAIBCC010000010.1; note = Pyrinomonadaceae bacterium
tttcggcgtttgccgagacatcttgcaaccggagcgatgtttcgtcgttcaagcgcacagattaactacgcatcacgggcttgttctttactgtgcgagtcaatgtcctagtagtgcaatttcggtttgaaatccgagatttaaatttgcactactaggacagactcgctggagttgaacaatcacgtcctttgtttattacgaagatcagcaaacgtcgaa

SEQ ID NO: 18641 - RNA, 220 nt, unidentified
  source 1..220: mol_type = other RNA; note = Related to NZ_JAFREP010000006.1; note = Acanthopleuribacter pedis
acgacggtgacgatccgtcttgcaatctggatggcggatcgccatccgtgcttgttggtttgtcacgcttcaccgactcgatcttcactgtgcggaattcacgctatgttcgccaggccggtacgggttccctgaacctcctggtcgaacatagcgcgattccgcgtcgagttgatcgattcggtctcgggaattcatcgaagatggatcgtcgccgtcg

SEQ ID NO: 18642 - RNA, 218 nt, unidentified
  source 1..218: mol_type = other RNA; note = Related to NZ_CP071793.1; note = Proposed Sulfidibacter corallicola
cggcggtgattgtcggctttgcaacccgggtggcgtttcgccatccatgcaacctgatctgtcacgcatcaccggctcgatcttcactgtgcggaactcgctatgtcagtgccaggtcggtttggattccctgaaccacctggtcaccgacatagcggttccgcgtcgagttgatcgatccggtctcgagattctctcgaaggtcgacagtcgccgcc

SEQ ID NO: 18643 - RNA, 221 nt, unidentified
  source 1..221: mol_type = other RNA; note = Related to JAGNHB010000094.1; note = Acidobacteria bacterium
gcgatggtggctcttttcccttgcaacccgggcggtggatcgccgtccatgtccgcagctgaagcacgcgtcactggccagctcttcactttgcgggtctcgccaccggtgggcaattacggtgtgaattccgtgaatttaattcgcccaccggtggcggacccgcttcgagttgatcagtccagtcccgagacgtttccgaaggaacccgactgccatcg

SEQ ID NO: 18644 - RNA, 218 nt, unidentified; identical to SEQ ID NO: 18642
  source 1..218: mol_type = other RNA; note = Related to NZ_CP071793.1; note = Proposed Sulfidibacter corallicola

SEQ ID NO: 18645 - RNA, 225 nt, unidentified
  source 1..225: mol_type = other RNA; note = Related to JACKEM010000004.1; note = Deltaproteobacteria bacterium
gggagacgcttcgagaaggaccttgcattaggggcggtggatcgccgtccaagcgaaatggcttctcttgcgtcactggtctgctcgtgactgtcgggattgcccaccggtccgttggtcccaagggggatcggcgtcgatcgaacgcaacgcaccggtgggcatcccttgtgagttgagcagtccagtcaggtgttaggacgaaggggtcttcgaagcgtctcc

SEQ ID NO: 18646 - RNA, 221 nt, unidentified
  source 1..221: mol_type = other RNA; note = Related to JAGQSB010000027.1; note = Acidobacteria bacterium
agcagcagtgggttccttccttgcaacccgggcggtggatcgccgtccatgtcaacaggcttcccatgcatcacgagcccgctctttactgtgcgaattacgcccaccacgctccattacggtatgaattccgtgaatttaatgaagcgtggtgggcaaattcgcgtcgagttgagcggtctcgtcccaagatgttttcgaagattcgaatccactgctgc

SEQ ID NO: 18647 - RNA, 222 nt, unidentified
  source 1..222: mol_type = other RNA; note = Related to JAHBVW010000058.1; note = Deltaproteobacteria bacterium
gcgtgacgggtggccttggaccttgcaacccgggcggcggatcgccgtccatgcggtcagctcgtgcgtgcctcactggctcgctcaagactgtgcgcacgtcgactcccccaaaggattccggtggggatttcgagaaatcgaatgccctcgggggagtcgacgtgcgctcgagcaaagcaatccagtcccgagagtagacgaaggtagccacccgtcacg

SEQ ID NO: 18648 - RNA, 220 nt, unidentified
  source 1..220: mol_type = other RNA; note = Related to JABFXX010000347.1; note = Kofleriaceae bacterium
gcgtggcgcgtggtcctagaccttgcaatcgggcggcggatcgccgtccttgcgttgatcccgcgcatacctcactggctcactcaatactgtgtgtccgcagtgcaccccaggagattccgagggggtttcgtgaaagcgaatgcacccggggtgcaccgcggccactcgagccgagcgatccagtcccaggcgtagacgaaggtaactacgcgccacg

SEQ ID NO: 18649 - RNA, 226 nt, unidentified
  source 1..226: mol_type = other RNA; note = Related to JAGPDK010000426.1; note = Kofleriaceae bacterium
gcgtggcgggtgagatacgaaccttgcaatctggttggcggatcgccaaccttgcggtcacgtaccccatccatcactggctcgctcaatactgtgtgccgacggcatggtgcagtcgattctcaagcggattcccgatgggaatcgaatgcaaccgcaccataccgtcggcactcgagccgagacgatccagtcccaggagtgaacgaaggtctcacccgccacg

SEQ ID NO: 18650 - RNA, 221 nt, unidentified
  source 1..221: mol_type = other RNA; note = Related to JABFRG010000606.1; note = Polyangiaceae bacterium
agagcgcgcgcggggcctgatcttgcaaaccgggcggcggatcgccgtccttgcagcctggccttccatgcttcactggctcgctcttgactgtgcgattaagacccaccacatcgaattccgggttcaatccggcagattcaatgtcgacgtggtgggtctcatcgcttgagttgagacgatccagtcccgagatctacgaagtgcctccgcgcgcgctc

SEQ ID NO: 18651 - RNA, 193 nt, unidentified
  source 1..193: mol_type = other RNA; note = Related to JAGQIK010000716.1; note = Myxococcales bacterium
catcctttgctttatgggcggcggatcgccgtcctagcgaaatggttgtccacgtttcactagctcgctcttaacgatgccggggctgccctgctgtcgctatcgcgagtgtcttccgcgaagacgatgagccgacagcagggcgccccggcttgagttgagcgatctagtcctgggagtctctcgaagggat

SEQ ID NO: 18652 - RNA, 209 nt, unidentified
  source 1..209: mol_type = other RNA; note = Related to JAFCZD010000018.1; note = Deltaproteobacteria bacterium
aagtcagacgactttgcattctgggcggtggatcgccgtctttgccgagtggtttttcatgcttcactagctcgctcttaactgtgccggtactgccctggtagtgctatcggcggttggattccgtgaatccgatgagccactaccagggcgtaccggctggagttgagacgatctagtcccgggcgtctttcgaaggaactctgacc

SEQ ID NO: 18653 - RNA, 223 nt, unidentified
  source 1..223: mol_type = other RNA; note = Related to JAEUJZ010000010.1; note = Myxococcales bacterium
gggatgagcgagagactcttcttgcaaccgggcggtggatcgccgtccatgcagcatggctgttcatgcatcactggtctgctctttactgtgcggccctgggcctgatgtccaaattgcaggttggttttcggaaaaccaatgttcgacatcaggcccgtgccgctcgagttgagacagcccagtcccaagaggtcttcgaagtcagctctcttgctctccc

SEQ ID NO: 18654 - RNA, 220 nt, unidentified
  source 1..220: mol_type = other RNA; note = Related to AFWT01000002.1; note = Thiorhodococcus sp.
tcggaagcggactcatcctttgcattctgggcggcggatcgccgtctttgccaagtggttattcatgcgtcactagctcgctcttaactgtggcgatactgccccctaggtgcctttgccggttgaatcccttggattcaaaggtgcacctagggggcgtatcgcctggagttgagacgatctagtcctgagtcattcgaaaggactccgcgccgctccg

SEQ ID NO: 18655 - RNA, 220 nt, unidentified
  source 1..220: mol_type = other RNA; note = Related to JAEUKG010000966.1; note = Myxococcales bacterium
gagacggctggcggggcgatcttgcaacctgggcggtggatcgccgtccatgcaacctggcccgtcatgcatcactggcccgatctttactgtgcgggacacagggtgctgtagggattccggtgggaatcctgggagattggatgccccacagcaccccggtcccgcttgagttgatcgagccagtccctcgtgggttcgaagaccccgtcggccgtct

SEQ ID NO: 18656 - RNA, 222 nt, unidentified
  source 1..222: mol_type = other RNA; note = Related to JAESTW010000014.1; note = Kofleriaceae bacterium
gcagcgatatagatccataaaccttgcagtatgggcggcggatcgccgtccttgtgaattggcctgtcatgcatcactagctcgctcgtgactttgccggggaagcctccctcgacgttcttcggtgtgatttgccgagaatataagaacgtcgagggaggctccccggccggagttgagacgatctagtcctgagagttgtacgaaggtatctaatcgctg

SEQ ID NO: 18657 - RNA, 222 nt, unidentified
  source 1..222: mol_type = other RNA; note = Related to NZ_JAHXBG010000009.1; note = Cystobacter gracilis
cggcggtcagagggcggtaccttgcaacccggacggcgtttcgccgtccttgcctgatggcctgtgatgcatcactggcccgctcttgactgtgccgtacctccctaccccaggcgtatggcggtttggattccgtaaatccatagcgcccggggtagggggtacggcttgagtcgagacgagccagtcctgagagcagtacgaaggtgctctcggaccgcc

SEQ ID NO: 18658 - RNA, 222 nt, unidentified
  source 1..222: mol_type = other RNA; note = Related to JAFGNZ010000091.1; note = Myxococcaceae bacterium
cggcggtcagagggcagtaccttgcaacccgggcggcgtttcgccgtccttgcctcctggcctgtgatgcttcactggcccgctcttgactgtgccgtgtctccctaccacgtgcgtatggcggtgtggattccgtaaatccatatcgcacgtggtaggggccacggcttgagtagagacgagccagtcctgagagctgtacgaaggtgctcttggaccgcc

SEQ ID NO: 18659 - RNA, 221 nt, unidentified
  source 1..221: mol_type = other RNA; note = Related to NZ_JADWYI010000001.1; note = Archangium sp.
cggcggtcagggggctgttccttgcaatccgggcggtgtttcgccgtccatgcctcatggcctgtcatgcatcactggcccgctcttcactgtgcgggtcctccctccctgtagcggcggcggtgtcaaccgcgtcggttccgcgcgccacagggagggggacccgctggagttgagacggtccagtcccgagagcggttcgaaggtgctcccggaccgcc

SEQ ID NO: 18660 - RNA, 220 nt, unidentified
  source 1..220: mol_type = other RNA; note = Related to JADIZX010000005.1; note = Myxococcales bacterium
cggcggtcttcggggtgacatcttgcaacacgggcggcgtttcgccgtccatgcgacctggccctccatgcgtcactggcccgctctcgactgtgcggacgacgcctagctggtgctgttccggggtcaatcccgagaattcaacgagcaccagctaggcgcgtccgcttgagttgagcgagccagtcccgagacatcttcgaaggtccccgaagccgcc

SEQ ID NO: 18661 - RNA, 220 nt, unidentified
  source 1..220: mol_type = other RNA; note = Related to JADJQX010000001.1; note = Myxococcales bacterium
cggcggacttcggggtcacatcttgcaaaccgggcggtgtttcgccgtccatgcaacctggccctccatgcgtcactggcccgctctcgactgtgcgtccgatgcctagctagtgctgttccgggttcaatcccgcatattcaacgagcaccagctaggcacggccgcttgagttgagcgagccagtcccgagacatcttcgaaggcccccgaatccgcc

SEQ ID NO: 18662 - RNA, 221 nt, unidentified
  source 1..221: mol_type = other RNA; note = Related to JAIOQA010000029.1; note = Deltaproteobacteria bacterium
cgcgacgacggagcactggaccttgcaaccgggcggcgtttcgccgtccatgcgacctggcccctcatgcgtcactggctcgctcgtgactgtgcgagggctgccaccacgcgtcgataccgagtggcatctcgcagatgtcatgcgacgcgtggtggcgccctcgctcgagttgagacgatccagtcctgagagctgtacgaaggttgctccgtcgttgc

SEQ ID NO: 18663 - RNA, 222 nt, unidentified
  source 1..222: mol_type = other RNA; note = Related to JAGPCY010000008.1; note = Kofleriaceae bacterium
gcggagcgatcaggcggcacatcttgcaacccggacggtggatcgccgtccctgcaacctggcctggcacgcatcactggcccgttcttgactgtgcgacgtctgccacccctgcgggataccggtgtcaatcccgcgtattccatacccgcaggggtggcgacgtcgcttgagttgaccgagccagtcggaagagtgttcgaaggaccgcctgacgctccg

SEQ ID NO: 18664 - RNA, 223 nt, unidentified
  source 1..223: mol_type = other RNA; note = Related to NZ_NETK01000001.1; note = Nannocystis exedens
tgacaacggcgaaggccgagcctagcaacccgggcggcggatcgccgtccttgcgaaatgctcgttcacgcttcactggcccgctcttgactgtgcggcccatcgggtagctgtcgctattccggtgtgacttccatgaagcgactgagcgacagctacccggggccgcttgagttgagcggtccagtcctttgagccttcgtagcgggtcttcgccgttgtc

SEQ ID NO: 18665 - RNA, 221 nt, unidentified
  source 1..221: mol_type = other RNA; note = Related to JAEUJW010000075.1; note = Myxococcales bacterium
cgacaacggcaagtgcatagccttgcaacccgggcggcggatcgccgtccatgcaaacagctcatacacgcttcactggcccgctcttgactgtgcggtacatcgggtagcagcggctattccggtgtggcttccgagaagcgaatgagccgctgctacccggtaccgcttgagttgagcggtccagtcctgagagccttcgaagggcactcgccgttgtc

SEQ ID NO: 18666 - RNA, 220 nt, unidentified
  source 1..220: mol_type = other RNA; note = Related to JADKFZ010000012.1; note = Nannocystis sp.
cgacaacgacgagggcaagccttgcaacccgggcggcggatcgccgtccttgttccatgctcatccacgcttcactggcccgctcttgactgtgcggtacatcgggtagcagcggctattccggtgtggcttccgagaagcgaatgagccgctgctacccggtaccgctggagttgagcggtccagtcctgagagccttcgaagggccctcgtcgttgtc

SEQ ID NO: 18667 - RNA, 219 nt, unidentified
  source 1..219: mol_type = other RNA; note = Related to JAGQIT010000589.1; note = Myxococcales bacterium
gcggcgcgaggtgaccaggccttgcaacccgggcggcggatcgccgtccatgccgcatgacaatgcacgcatcactggtctgctcgttactttgcggtacctcggggtagtgtcgctattcctgtagggattccgtgaaccgaatgagcgacactaccccgggtaccgcttgagttgatcagcccagtcctggggagccttcgaaggcgccgagcgtcg

SEQ ID NO: 18668 - RNA, 222 nt, unidentified
  source 1..222: mol_type = other RNA; note = Related to JACKDU010000005.1; note = Myxococcales bacterium
cagcggcgcgaggagccaggccttgcaacctgggcggcggatcgccgtccttgccgcatgacaatgcacgcatcactggtctgctcgttactgtgcggtacctcggggtagtgtcgctattccggtgagggtcccgcgaaccgaatgagcgacactaccccgggtaccgcttgagttgaccagcccagtcccggggagccttcgaaggcgccagacgccgct

SEQ ID NO: 18669 - RNA, 225 nt, unidentified
  source 1..225: mol_type = other RNA; note = Related to JACKDW010000029.1; note = Myxococcales bacterium
cagcggcggtggtgaaccagccttgcaaaccgggcggcggatcgccgtccatgcacacagctcagccacgcgtcactggtccgctctttactgtgcggtaccatcgggtagtcgtgcttttccggtgcgacttcggagaagtgaataagcacgactacccgacgtaccgcttgagttgagcggcccagtcctgaggagccttcgaagggactcgcccccgtcgcc

SEQ ID NO: 18670 - RNA, 219 nt, unidentified
  source 1..219: mol_type = other RNA; note = Related to JAGQQQ010000127.1; note = Planctomycetaceae bacterium
cggaagcacgagtgagccttgcaacttgggcggcgtatcgccgttcgtgtcaattggttgaaactgcgtcactggtccgctcttgactgtgccattctcgcaccagtacggcgtttgcggtgcgaatccgttggattcaaactgccgtactggtgcggaatggcttgagttgagcggcccagtcctcagagcctttcgaagggaaactcgcctgctccg

SEQ ID NO: 18671 - RNA, 220 nt, unidentified
  source 1..220: mol_type = other RNA; note = Related to DLZC01000224.1; note = Planctomycetaceae bacterium
tggcggtcctgcagtgagccttgcaacccgggcggtggatcgccgtccatgcaacctgctttgaaccgcgtcactggtccgctcgtgactttgccggacatcacacctgtacgtcgattccggtgtggattccgcgaatcgaattcaacgtacaggtgtggcccggcttgagttgagcgacccagtcctgagagcctttcgaagggaatctgcagccgcc

SEQ ID NO: 18672 - RNA, 221 nt, unidentified
  source 1..221: mol_type = other RNA; note = Related to NZ_CP036281.1; note = Polystyrenella longa
agcagccggtgaagtgagccttgcaacccgaatggtggatcgccattcatgtgaattgataggaaccgcatcactggcccactcgtgactgtgcgggctgtcacctagtaacggtaattgcagtgtgaatcccctggattcaattgaccgttactaggtggcccgcttgagttgagcggtccagtcctgagagcctttcgaagggaagtcttaccggctgt

SEQ ID NO: 18673 - RNA, 219 nt, unidentified
  source 1..219: mol_type = other RNA; note = Related to JABMRB010000852.1; note = Candidatus Nealsonbacteria bacterium
ggaccggtcgagcgagccttgcaatccgggtggcggatcgccatccatgtgaaacgaattggaccgcatcactggcccgctcttgactgtgcggactacgccaccggtgcccgtttgctgtgcgagtcccaaggactcaaacagggcaccggtggcagtccgcttgagttgagacggtccagtcctcagagcctttcgaagggaaatgctcgtccggcc

SEQ ID NO: 18674 - RNA, 223 nt, unidentified
  source 1..223: mol_type = other RNA; note = Related to NZ_CP036433.1; note = Lignipirellula cremea
agacggcggttgcgagcgagccttgcaacccgggcggcgtatcgccgtccttgccaaatgatagagaccgcatcactggcccgctcttgactgtgcggaacatgcccacgggacgccatttacggtgcgtgccccgtgggcataaatagcgtcccgtgggcgttccgcttgagttgagacggtccagtcctgagagcctttcgaagggagctcctccgccgtc

SEQ ID NO: 18675 - RNA, 226 nt, unidentified
  source 1..226: mol_type = other RNA; note = Related to JAHQVJ010000249.1; note = Myxococcales bacterium
ctgaggtgggcagcgcacgccttgcaacccgggcggtgtcatcgccgtccatgcgcacagctgtgctctgcctcactggtccgatctccactatgcgctatagggccccctgccggcggcagcgatgggcctcgtgctcgaggtgccgcccggtagggggcccaatagcgcgtcgagttgatcgacccagtctccagcgagagcgaagacctcgctgcccatctca

SEQ ID NO: 18676 - RNA, 229 nt, unidentified
  source 1..229: mol_type = other RNA; note = Related to JAHJCH010000337.1; note = Myxococcota bacterium
agggtgcggtcgaggcaaagcttgcagtggggcggtggatcgccgtccatgcaccttgaccgagcatgcgtcactggcctgctcttcactggtaggccccagtatgggctagtccgtatttggcggtgcgttgtctgccgacaacaattacggactagcccataggggccttaattgagttgagacagtccagtctccgacgagaacttcgaagttttcggccgcgccc

SEQ ID NO: 18677 - RNA, 219 nt, unidentified
  source 1..219: mol_type = other RNA; note = Related to NZ_CP042468.1; note = Persicimonas caeni
cagcagtgagagggcagcaccttgcatcatgagcggcgattcgccgttcgcgatcaaagccctacaacgcgtcactgactcgctcgtgactgtgcggcctaaccctccccgggcgccgctccagtccggcttcggtgaagcgagcggcgcccggggagggtggccgcttgagttgagcgatccagtcaacagactggcacgaaggtccctctcactgct

SEQ ID NO: 18678 - RNA, 219 nt, unidentified
  source 1..219: mol_type = other RNA; note = Related to NZ_JAFREP010000009.1; note = Acanthopleuribacter pedis
cccccacgggtcgtgctcaccttgcaacccgaatggtgtttcgccattcatgcgctcagacccaccatgcatgcccggtcggcgcgtggcgcgacgtcgcctgtaccgcccgcgacattacggttcgaattccgagaacctaatgcgcgcggacggcgggtcgacgtcggcgccgtaccgcccggcaggatctagttcacgaagggacgacccatgggg

SEQ ID NO: 18679 - RNA, 232 nt, unidentified
  source 1..232: mol_type = other RNA; note = Related to SECR01000885.1; note = Myxococcales bacterium
ctgcgcagcgacggtcacgtcttgcaacccgggcggtgcatcgccgcccttgcatcctggtttcccgtgcatccctggcccgctcttcactgtgctaggccgctagccgtccgcgagatgcggtggccacagcgtgctacgcacaccgtgatctgcgcggacggctagcggcctagcttgagttgatcgagccaggcccgagcgtcttacgaagcacgaccgtcgctgcgca

SEQ ID NO: 18680 - RNA, 216 nt, unidentified
  source 1..216: mol_type = other RNA; note = Related to JAGQVA010000789.1; note = Bacteroidetes bacterium
atggaaagagggtgcaaagatcttgcatttggaatggtggatcgccattcgcgcatgctggtttggacagcgtcacaggccagttctttactttgcaaatagacaccctatacgtcacttccggtgtgacttccaggaagtgaagtaacgtatagggtatcatttgcttgagttgaactctcctgaaataaggaagtacgaagtaaccctcttcca

SEQ ID NO: 18681 - RNA, 219 nt, unidentified
  source 1..219: mol_type = other RNA; note = Related to JAFEUL010000003.1; note = Actibacterium sp.
agaaggcgcatggcggctttgcttattggatggtgtttcgccatcccggcctattgactgctcatgcatcgctggcgcgctctctatttgggcaccccagccccaccatgcgctttgctgtatgacttccgtgaagtcaaagacgcatggtggggcggggtgccctcgagttgagcgttccagcgctgggacttgttcgaaagtccggcatgcgctttt

SEQ ID NO: 18682 - RNA, 222 nt, unidentified
  source 1..222: mol_type = other RNA; note = Related to JAKRGB010000012.1; note = Ruegeria sp.
aaagcaagaggctgggagccttgcatcttgggcggtgtttcgccgtccgcgccaaccgactgtacatgcgtcgctggctcaatcttcacaacgcgaccccagccacccctatgcgcttgccgtttgagttcgcagaactcaaggcgcataggggtggcggggtcgctgggagttgatcgatccagccctgagagctgttcgaaggcaccagtcctcttgctt

SEQ ID NO: 18683 - RNA, 247 nt, unidentified
  source 1..247: mol_type = other RNA; note = Related to PBMT01000060.1; note = Proteobacteria bacterium
atggcttgcaacccgagcggtgtttcgccgttcttgcacactgttctttcatagaaactggaaacgactctatatagagcctcttgcagcgctgtgcagggcgggggccggcatctatcaatcggtatagcaattttccttcgaaacgaaggtagaccgatcaatagatgccggcccccgccctgcacagcgctgcaagaggctgatcgagttgtcgcctccagtgacaaagcttgacgaagccaca

SEQ ID NO: 18684 - RNA, 235 nt, unidentified
  source 1..235: mol_type = other RNA; note = Related to NZ_JADPIB010000005.1; note = Aureivirga marina
agagattttgttagcataaatactatggtgtttcgccatggttggagtaaagttctaattacatcactacacgtcaatgacattcagcgtgactcttaggtactataacgtactattgtaccttgtaatgctgagattcattgacattccttaaggtacaatagtacgttatagtacccccgtcacgcctacagtgattgaaggtagtacttggaaagattttgtaacaaaattc

SEQ ID NO: 18685 - RNA, 253 nt, unidentified
  source 1..253: mol_type = other RNA; note = Related to NZ_CP048222.1; note = Rhodocytophaga sp.
ttgttgaaaatataagtttttgttagcataaatgctgcggtgtttcgccgtggttgtagttaagctattcatacttcattacacattcatgccattcagcgtgctcctctacccatgggtagtaattcgttagaaaatcgctgaataagcagtggctcaattggtctagactaattactacccatgggtagctccacccgcttacagtaatgaaagataatcctgtgcagagttagtaacaaaaatttcaaca

SEQ ID NO: 18686 - RNA, 242 nt, unidentified
  source 1..242: mol_type = other RNA; note = Related to JABHVB010000067.1; note = Rhodospirillaceae bacterium
ttgcggcgcaggtttgttcctagcaaaaatgccgcggcgtttcgccgtggttgtagtaaagccggtgatacgtcatcggataccaatgtcactcagcccacgtagcgggaacgggcccttcccgcatcacgctgaggcgacttcaaggaagtccatgatgtgggacgagccctttcccgctacgtgggcctacagcgatcggcaccgatcgttgagagatggtaggagcaacctgcgccgcg

SEQ ID NO: 18687 - RNA, 229 nt, unidentified
  source 1..229: mol_type = other RNA; note = Related to VGQQ01000059.1; note = Cyanobacteria bacterium K_DeepCast_35m_m1_288
aggttcaggctcctcctagcaataacgccccggtgcttcgccggggcagcgttcacgcctctcatccaccatcggctgccgatgtcactcagcggccccggccttcccggccgggaacgcttcgctgagccgactgcaggcagtcacaacgcgttcccggccgggaaggccggggccgcctacagcgatcgacaccgatctcagctggatagtaggaagagcctgcacc

SEQ ID NO: 18688 - RNA, 230 nt, unidentified
  source 1..230: mol_type = other RNA; note = Related to JABMNF010000410.1
tgagtgtatggtcttcctagcaattcgcctcggtgcttcgccgaggtagcgttcacgtctctcatccaccatcggctgccgatgtcattcagcggcaacgggccaaaatgcccggagcgcttcgctgaatcgactgcaagcagtcacttttgcgctccgggcgttttggcccgccgccgcctacagcgatcgtcaccgatctcagctggatagtaggaagatctgcgctc

SEQ ID NO: 18689 - RNA, 225 nt, unidentified
  source 1..225: mol_type = other RNA; note = Related to AE017126.1; note = Prochlorococcus marinus
aggcaggctgttctagcaattaaaccttggcgtttcgccaaggcagtagttaagctacaaaaccatcatcggctgacgatgtctctcagcatctagctgcttaggccggcctaaacctttctctgaaacgactctacgagtccttcaaagtttaggccggcctaagccgctagacgcctacagtgatcgacaccgatcatagatagggcagtagaacagcctcca

SEQ ID NO: 18690 - RNA, 239 nt, unidentified
  source 1..239: mol_type = other RNA; note = Related to NZ_NIGF01000009.1; note = Abditibacterium utsteinense
ccaatgcccgatgcgtggtgccagccttttatctgcgatgtttcgtcgcggtggccgtcaagctctcatcacatcaccggcacgccgtcgcgttttcgcgtcagtgcgtagtagtgcggttcctgtctcggcgctgagagagacaagctcaccggccaggaaccgcactactacgcactgacgctacagtggacggcgccggtcgcttcgctgttaagtggcatttcgcgcgggcattg

SEQ ID NO: 18691 - RNA, 233 nt, unidentified
  source 1..233: mol_type = other RNA; note = Related to AP024152.1; note = Abditibacteriota bacterium
cagccaatgccgaaaggcggccagcatctttgcgatgtttcgtcgcggaagcgttcacgccacctttccatcaccggagcgccgtcgtgttttcgcgctaggcgcgtactagtgcgggagaccgagtcgcggattggggcaagcccaccacgatctcccgcactagtacgcgcctagcgctacagtggacggagccggtcaagtctgtaaagtggccgctttgggcgttggct

SEQ ID NO: 18692 - RNA, 235 nt, unidentified
  source 1..235: mol_type = other RNA; note = Related to JAFAZH010000051.1; note = Abitibacteriaceae bacterium
accttgaggcagctcatttccggcaatttgtccccggcgtttcgccgtggccgtcgtatcgctcgtcatccttcacgggccgccagtgtgatttcacccgctgcgcaccggtaggttgcttgatttcccgctgaagcagcgtagctcaggccatcaagcaacctaccggtgcgcagcgggttacagtgactggcgcccgtcccctctgtttagcggcaatgtagatgcttcaagg

SEQ ID NO: 18693 - RNA, 201 nt, unidentified
  source 1..201: mol_type = other RNA; note = Related to JACMJB010000482.1; note = Cytophagales bacterium
aagccgtaccggacgaaacagcgtcacttacccctcgggaccggcgtcggccactgtaggcgcagtaccgtacaccagtggccggtcgtgtcgtgggccaccgccgaatcagcgcatacgaccggccactggtgtacggtactgcgcctacagtggccgacgccggtccctgggaggtacgtagcgtcgctcaccccgctc

SEQ ID NO: 18694 - RNA, 250 nt, unidentified
  source 1..250: mol_type = other RNA; note = Related to NZ_JACHGW010000004.1; note = Armatimonas rosea
gtggagggcggagctaaaatcgttagcctttcaagccttcgggtttgagccacgatgcttcgtcgtggtggccgtaaagctcgctttacatcaccggtcgccgatgcgactcagcgcaggccgcactagtggcggtctaccgttcgcgctgaggagcctgcggccacgccccgtagaccgccactagtgcggcctgcgcctacagtgatcgtcgccggtccctgcaggatagtagcgattccgccctcca

SEQ ID NO: 18695 - RNA, 232 nt, unidentified
  source 1..232: mol_type = other RNA; note = Related to NZ_BHFQ01000005.1; note = Capsulimonas corticalis
gtttcgggagcggtgtggttagcaattcgtctgcggcgtttcgccgcggctgccgtgaagatggcttcacttcaccggtcaccgtttctactcagcccggcgacggggtagtgcacccctctgccggcgctgagtcggacgtggcccaccaacagaggggtgcactaccccgtcgccgggcctacagtgaacggcgccggtcctccgtgtcaagtagccgtcgctcccgaaa

SEQ ID NO: 18696 - RNA, 233 nt, unidentified; identical to SEQ ID NO: 18691
  source 1..233: mol_type = other RNA; note = Related to AP024152.1; note = Abditibacteriota bacterium

SEQ ID NO: 18697 - RNA, 226 nt, unidentified
  source 1..226: mol_type = other RNA; note = Related to NZ_PZZP01000001.1; note = Desmospora activa
acgaattctactttgtctagctgattgtgcggtgtaccgccgcacatgccgtgatgtgtcacattcatcacccggctccgcgcgacttggcaggcctaatgcggggatacccccctttttcgcctactagtcaagcgtagctacggccaaaaaggggggtatccccgcaggcctgttcagtggcgaagccagctcctatgagttgtagtggacgaagtcgatttcc

SEQ ID NO: 18698 - RNA, 225 nt, unidentified
  source 1..225: mol_type = other RNA; note = Related to NZ_FXTI01000004.1; note = Melghirimyces algeriensis
gatgagatgtttgttcagcaaccctgcatggcgtaccgccatgtgtgacgtgatgtgagagattcatcacccggctccgcgcgacttggcaggcccaaagcatcaggggtacctgttaaggagcccctaaacaggcgtagccgctgctcctcaacaggtacccctgatgcgggcctgtacagtggcgaagccaactcctgagatctgtagtgaacaaacactcaa

SEQ ID NO: 18699 - RNA, 234 nt, unidentified
  source 1..234: mol_type = other RNA; note = Related to QJKK01000010.1; note = Thermoflavimicrobium daqui
gttcagcaaagagtgacttgtctagccattagcatggtgttacaccatgtatgcaataatgtctcacattcgtcactcggctccgcgctacttaggcaggcctcctatatggggtactagtttgataggtcgcctaaggaggcgtagccgctcctatcaactagtaccccatatagggtcctgttcagtggcgaaaccaagttcgaagagtgttagtagacaagttgtgcaaaa

SEQ ID NO: 18700 - RNA, 213 nt, unidentified
  source 1..213: mol_type = other RNA; note = Related to NZ_FORR01000019.1; note = Thermoflavimicrobium dichotomicum
gtgacttgtctagcatctggcatggtgttacgccatgtatgcgtaaatgctgctcattcgtcactcggctccgcgctacttaggcccccgatagtaggggtacatcggtaatagaacacctaagtaggcgtagccgtgatctattcctgatgtacccctactatgggggtacagtggcgaagccaactcccaagagtggtagtagacaagtca

SEQ ID NO: 18701 - RNA, 220 nt, unidentified
  source 1..220: mol_type = other RNA; note = Related to NZ_FQVL01000006.1; note = Seinonella peptonophila
atagagatttatctagctgctaatatacggcgatacgctgtgtttgccttgacgtgaacaattcgtcacccggctccgcgctactttggcaggcccaatccacctggtacccccctggattagacctgagtaggcgtggccgtcatatccaggggggtaccaggtggggtcctgtacagtggcgtagccaactcaaggatttttagtagataaatttctg

SEQ ID NO: 18702 - RNA, 226 nt, unidentified; identical to SEQ ID NO: 18697
  source 1..226: mol_type = other RNA; note = Related to NZ_PZZP01000001.1; note = Desmospora activa

SEQ ID NO: 18703 - RNA, 213 nt, unidentified
  source 1..213: mol_type = other RNA; note = Related to NZ_CP048104.1; note = Kroppenstedtia pulmonis
aagcggtgttcagcaatctgtgcggtgttacgccgcgcttgcaggaacgtgtcacatccatcacccggctccgctctactttggcagggaataggggacctgtacccccttttgccagcctgagtaggcgtcgccactgacaaaagggggtacaggtcccctattccctgttcagtggcgtagccagctcccaagggtatagtggacaccgct

SEQ ID NO: 18704 - RNA, 230 nt, unidentified
  source 1..230: mol_type = other RNA; note = Related to NZ_LN812102.1; note = Risungbinella massiliensis
gttcggctatgaaagtctagcaactcgtacggcgttacgccgtgcatgctctcaagctgttttcacttcaaccggcactgcgctacttaggcagcacctatcgtctacgggggctacctgtagagatcctaagtaagcgtagctgctctctacaggtagcccccgtagacgggtgctgttcagtggcatcaccggttcggataggaagaaagtggacttacatagcagaa

SEQ ID NO: 18705 - RNA, 216 nt, unidentified
  source 1..216: mol_type = other RNA; note = Related to NZ_SLXV01000034.1; note = Baia soyae
taatacttgtctagcaattttgcatggtgttccgccatgtttgcagaaatgtcttctattcgtcaatcgatctcgcgttacttaggcagaactactaaataggggtacctgtttagctgtctaagtagccgcaggccacaactaaacaggtacccctatttagtagttctgttcagtacgagatccattccaaggtatttttagtagacaagtatt

SEQ ID NO: 18706 - RNA, 216 nt, unidentified
  source 1..216: mol_type = other RNA; note = Related to JAKWBN010000001.1; note = Shimazuella sp.
taaaagttatctagctttcttgtgtacggtgttacgccgtatctgcgtgtaagattcacatacttcatccggtcccgcgttactatactagccctaccgtggtggggggtgattgtggccgcctaaagaggcgtagccgctaccacaatcgaccccccaccacgggggctagctcagtggcgttaccagatcatggtgttttcgtagataactttt

SEQ ID NO: 18707 - RNA, 217 nt, unidentified
  source 1..217: mol_type = other RNA; note = Related to NZ_ATZF01000012.1; note = Shimazuella kribbensis
tagaagttatctagctatcttgtgtacggtgttacgccgtatcagcgtgtaagattcccatacatcatccggtcccgcgttactatactagacctaccgggtaggggggtgatcgtgagttgcctaataaggcgtagccgcaactacgatcgacccccctacccggggtctagctcagtggcgttaccagatcatagtgttttcgtagataacttct

SEQ ID NO: 18708 - RNA, 222 nt, unidentified
  source 1..222: mol_type = other RNA; note = Related to JACXAG020000009.1; note = Hazenella sp.
tgagcatcattgatttagctttttgcatggcgatacgccatgcttgatgtgacgtatacaatccgtcacccgtctccgcttgattagtcaggatcccctactagagggtgcattctatcctgactaatgaggcgtagcctcggcaagaatgcaccctctagtaggggatcctgtccagtggcgaaaacgactccaaagtgttttagtaaatcaatgatgctc

SEQ ID NO: 18709 - RNA, 229 nt, unidentified
  source 1..229: mol_type = other RNA; note = Related to NZ_SMAG01000003.1; note = Hazenella coriacea
acatagagacttgttctagcattttgaacacggtgttacgccgtggctgcgttgatgactaacactcgtcacccggctccgcgcgactttggcaggcccttcccgataggtagggtgctaaattctgcctaagtaggcgcagccgcaagaatttagcaccctacctatcgggggtcctgttcagtggcgaatccagctcggagagtcttagtggaacaagttctcaacg

SEQ ID NO: 18710 - RNA, 218 nt, unidentified
  source 1..218: mol_type = other RNA; note = Related to NZ_BMEX01000001.1; note = Kroppenstedtia guangzhouensis
ccatccttgttcagcatgattgtatggcgttccgccatgcttgcgttgacggtaccaatccgtcacccggctccgccctacttggcagtcgggggtgtactaccacccgactcggctgcctaaaaaggcgtagccgcagcctcttttgtcgggtggtagtacacccccgactgttcagtggcgaaaccgactcgatggaattttagtgaacacggatg

SEQ ID NO: 18711 - RNA, 229 nt, unidentified
  source 1..229: mol_type = other RNA; note = Related to PVTZ01000010.1; note = Laceyella sediminis
acataaaataagactttgtctagccaattgcacagtgatacgctgtgcgggacatgatggcaaacaatcatcacccggctccgcgttacttagtcagccctagtgcaccccttagtgcgttaggttctgcctaagcaggcgtagccggacctaacgactaaggggtgcactagggctttttcagtgcaaacccagatccgaagactgttagtagacaaagtgattcatg

SEQ ID NO: 18712 - RNA, 218 nt, unidentified
  source 1..218: mol_type = other RNA; note = Related to NZ_CP034118.1; note = Staphylospora marina
atgactttgtctagcgaagcttcgcgcggcgatccgccgcgttcgacgtgaagtgtcctttcacttcacccggctccgcttgtcttggcaggcacaccacagctgacaccatttgtggcctgcctgggcaggcgtggccgcggccaaaatggtgccagctgtggtgtgcctgctccagtggcgcagccaggtcccaagggtgttggtggacaaagtcg

SEQ ID NO: 18713 - RNA, 221 nt, unidentified
  source 1..221: mol_type = other RNA; note = Related to NZ_CP036426.1; note = Tautonia plasticadhaerens
agggaggcagcggtcccattagccgatcgtgcggcgatacgccgcgcaggtccccgtgcccgacactcgtcacgcgcccgaccgccatctgcggccggggcaccgaccaggccctcgcctggttcggttgctccgcaacccgagggccccggtcggtgccccggccgctccagttggccggtcgcgtccgaaggatgttcgtagcgggaccgctgcctccc

SEQ ID NO: 18714 - RNA, 221 nt, unidentified
  source 1..221: mol_type = other RNA; note = Related to NZ_RYZH01000020.1; note = Tautonia sociabilis
agggaggcagcggtcccattagccaatcgtgcggcgatacgccgcgcaggtcaccgtgcccgtcattcgtcacgcgcccgcccgccgtctgcggccgggggaccgaccacggccgcagctgggtcggttgctccgcaacccgcggccggcggtcggtcccccggccgctccagttggccggtcgcgtccgaaggtcgttcgtagcgggaccgctgcctcct

SEQ ID NO: 18715 - RNA, 222 nt, unidentified
  source 1..222: mol_type = other RNA; note = Related to JAGQQD010000063.1; note = Planctomycetaceae bacterium
ggaatgggatggtggcaggattagccaattgttcggcgatacgccgagcgggtttccgtgcttgtcattcgtcacgtgtccgttcttcaccccgcgaccggcgtactacccggcccgcgctgggtggagtccacaggcctccgcgggcccacgggtagtacgccggtcgctttagtggaccgaacacgtcctcaggatgttcgtaaccccaccaagtcaccc

SEQ ID NO: 18716 - RNA, 225 nt, unidentified
  source 1..225: mol_type = other RNA; note = Related to JADJAE010000011.1; note = Deltaproteobacteria bacterium
ggacggggcgtggtgagtgacttagcaatctgtgcggcgttacgccgcgcttgtcgaagtgcccgccattcgtcacgagcccgttcatcacacgcgtaccccgacggtgcccggcagcgctctggttgggtgcctccggcaccgcgctgccatggcaccatcggggtacgctttaagtggaacggtcgcgtcccagggatgttcgtaagcccaccgcgccccgtc

SEQ ID NO: 18717 - RNA, 224 nt, unidentified
  source 1..224: mol_type = other RNA; note = Related to JAEUIF010001171.1; note = Planctomycetia bacterium
ggttcgagacagcggactagcttagccgtttgcacggcgttacgccgtgcgggtttccgtgccggtcattcgtcacgtgcccgttcggcacagcgcggcccccgcactagcaggggctcgcgctgggtcgggcccgccgggccccgcggctccctgctagtgcgggggccgcttcagtggaacgagcacgtccgcaggaggttcgtaaggccgctgtctcgact

SEQ ID NO: 18718 - RNA, 233 nt, unidentified
  source 1..233: mol_type = other RNA; note = Related to JADLFP010000276.1; note = Acidobacteria bacterium
ggggagccgggatcgcgtttctagccaagaaggtcatgccttccgtgcggtgtcacgccgcgcttgcccacgtgcccggcattcgtcacgcgcccgtttaccactcgctgccggcggcaccggtcggaccgctcctggatgggtcccgccgggacccgcggtcttcgaccggtgcgccggcgcttcagtcaaacgagcgcgtcccgtggaagttcgtaggacgcccggctccc

SEQ ID NO: 18719 - RNA, 222 nt, unidentified
  source 1..222: mol_type = other RNA; note = Related to MGST01000139.1; note = Deltaproteobacteria bacterium RIFOXYA12_FULL_58_15
tggacggtaggctcgtcgattagccatttgtgcggtgttacgccgtgctggccggaatgcttgtcattcgtcacgagcccgttcgtcacccgcggacaatggactggtgtgcccgcttgctgggtcgtgcccttcgggcaccgcgggctcacaccagtccattgtccgctttagtggaacggtcacgtcgtaggatgttcgtaaacgacgggcctgccgtcc

SEQ ID NO: 18720 - RNA, 223 nt, unidentified
  source 1..223: mol_type = other RNA; note = Related to JAIOJK010002653.1; note = Sandaracinaceae bacterium
acggggcgtgagcccgctgacctagccatccgtgcggcgctacgccgcgcaggcccacgtgcttcgcactcgtcacgtgcccgttcggcacacgcggcccacgcgggctcccgccctatgctgggtgggctgctccgcagccctcgggctttggagcccgcgtgggccgctcaagtggaacggtcgcgtccccaggaggttcgtaggcgccgctcgcgccccg

SEQ ID NO: 18721 - RNA, 223 nt, unidentified
  source 1..223: mol_type = other RNA; note = Related to JACRDB010000039.1; note = Deltaproteobacteria bacterium
acggtgcgcggggtacgcggtcttagcaatccgtgcggtgctacgccgtactttgctcccgtgcctgccattcgtcgcgagcccgttcgtcactcgcctaccacgcgggtgtcgcgcggtcgctggacgggttgttccacaacccaccgcgcgtacacccgcgtggtaggctattggtggaacggtcacgcccaagggatgttcgtaagcgccccgcgcatcg

SEQ ID NO: 18722 - RNA, 222 nt, unidentified
  source 1..222: mol_type = other RNA; note = Related to JAEUKH010000004.1; note = Myxococcales bacterium
gggcgaagggcgacgatgtagcaaccagtgcggcgttacgccgtgcttgtctccgtgcctgtcattcgtcacgagcaggttcgtcacccgcctaccaggggtaccgcgcaaggctactggttcgaccgctccgcggtcagccttgccgcggtacccccggtaggctttctgttgaacccgcgcgtcgatcgtagggatgttcgtacaacacagcccttcgcc

SEQ ID NO: 18723 - RNA, 194 nt, unidentified
  source 1..194: mol_type = other RNA; note = Related to JAIBCE010000260.1; note = Sandaracinaceae bacterium
tcggcctggccattcgtgaggcgctacgcctcgctggctcacacgctccccatccgtcacgggccttgtcggcactcgccgccgcggaccctgcccgcccgcagctgttcggggacctccggtccccgcgggcagtggcagggtccgcggcggctatagtggacccgtcccgtccgagggctctacgcaggccg

SEQ ID NO: 18724 - RNA, 241 nt, unidentified
  source 1..241: mol_type = other RNA; note = Related to NZ_CP011125.1; note = Sandaracinus amylolyticus
gcgaggagctccgcgcgcacgagcccactccgtctgtttcggcagcgcggagaccgcggcgttacgccgtggtggaacctgcttcctcatgcaaccccacgcccgatgttcttttgggcgccgcaggggcctgtgtccgacaccggagcgactcgatgagtccgtcggaacacaggcccccgcggcgccttcgtgatcggacgtggtccaacgcacgaagtcgagcacgcggggctcctcg

SEQ ID NO: 18725 - RNA, 219 nt, unidentified
  source 1..219: mol_type = other RNA; note = Related to JACOUT010000011.1; note = Deltaproteobacteria bacterium
acggagcgagcgtgcgcaggtagcaaccgcgcggcgatacgccgcgcatgccgaaatgcccggcattcgtcacgcgcccgttcttcacccgcggcccgcactaccctcagcgcccagctggatcggccgctccgcggcccgggcgctaacgagggtagtgcgggccgcttcagtggaacgagcacgtccgcagcatggtcgtactgcacgctcgctccg

SEQ ID NO: 18726 - RNA, 225 nt, unidentified
  source 1..225: mol_type = other RNA; note = Related to JADZDY010000308.1; note = Deltaproteobacteria bacterium
aggacggagcgagcgcgcgcatgtagcaaccgcgcggcgatacgccgcgcatgcccggatgtcagtcattcgtcacgcgcccgtacttcacccgcggcccgcactaccctcagcgcccagctggatcggccgctccgcggcccgggcgcttacgagggtagtgcgggccgcttcagtggaacgagcacgtcctgagcatgttcgtactgcacgctcgctccgtcc

SEQ ID NO: 18727 - RNA, 223 nt, unidentified
  source 1..223: mol_type = other RNA; note = Related to JAEUKD010000148.1; note = Myxococcales bacterium
acgggacgagaagggcaagatctagcaacccgtgcggtgttacgccgcgcttgcagtcgtgcttcgcattcgtcacccgcctattcgtcactcgacggatcgacacctgtcgtactcgcaagctgtatgggccgctccgcggcccgcggtactgacaggtgtcgatccgtcttaagtggaacaggcacgtcccgagagagtcgtaggtcccgctctcgtcccg

SEQ ID NO: 18728 - RNA, 223 nt, unidentified
  source 1..223: mol_type = other RNA; note = Related to JAHBWD010000079.1; note = Labilithrix sp.
ggatggggacgaggccagctctagcaaccgtgcggcgttacgccgtgcttgcctacgtgccgtgcattcgtcacgcgcccgttcgtcactcggcgctcgtcggacccgtccgaccgcatgctgtttgggtcgctccgcgacccgcggtcgtgacgggtccgcgagcgccttaagtggaacgagcacgtccccagggagctcgtagagatctctcgtccccatc

SEQ ID NO: 18729 - RNA, 216 nt, unidentified
  source 1..216: mol_type = other RNA; note = Related to PABA01000151.1; note = Sandaracinus sp.
acgaaggcgccgggtctagccatccgcacggtgctacgccgtgctggccgagctgctcgacattcgtcacgagtccgttcgtcaccacgggagccatgccccccgcacccttcgctggttcgacacctccggtgtcccgggctcacggggggcacggctcccattcagtggaacggcctcgtcctccgcaaggaacgtagacgccccgccccgtcg

SEQ ID NO: 18730 - RNA, 208 nt, unidentified
  source 1..208: mol_type = other RNA; note = Related to NZ_OKRA01000001.1; note = Clostridium sp.
gaaacacatggatttcttggcctttatactgtggtgttgcgccatggtggagatttgtcatacatacatcattaggttgcgcgcaattcgctacgctactaatactgtgcacattaaaaatcgatccttcggttatgtgacagtattagtgctacgctgaagtgtcacaaccgaatataagaattgttagcaagaaatatatgtagtt

SEQ ID NO: 18731 - RNA, 198 nt, unidentified
  source 1..198: mol_type = other RNA; note = Related to NZ_JAHXPT010000003.1; note = Clostridium weizhouense
acatagatttcttggcctttatgctgtggtgttgcgccacggtggagatttgtcaaatacacatcattaggttgcgcgcaattcgctacgctaccaatactgtgggcattaaaaatcgagccttcggttatgccacagtattggtgctacgctgaagtgtcacaaccaaatataagaattgttagcaagaaatctatg

SEQ ID NO: 18732 - RNA, 198 nt, unidentified
  source 1..198: mol_type = other RNA; note = Related to NZ_FOMG01000001.1; note = Clostridium uliginosum
acgtagatttcttggcctttatgcctcggtgttgcgccgcggtggagatttgttagacacacatcattaggttgcgcgcaattcgcttcgctaccaatactgtgcacattaaaaatcgagccttcggttatgtgacagtattggtgctacgctgaagtgtcacaaccaaatataagaattgttagcaagaaatctatg

SEQ ID NO: 18733 - RNA, 200 nt, unidentified
  source 1..200: mol_type = other RNA; note = Related to AE015927.1; note = Clostridium tetani
tttgtagatttcttggcctttatgctatggtgttgcgccatggtggagatttaccatacatacatcattaggttgcgcgcaattcgctacacgacctataatgtgcacatttaaaaccgatccttcggttatgtgacattataggtgttccgctgaagtgtcacaaccgaatataagaattgttagcaagaaatctataa

SEQ ID NO: 18734 - RNA, 200 nt, unidentified
  source 1..200: mol_type = other RNA; note = Related to NZ_QXDJ01000001.1; note = Clostridium chromiireducens
gagataggtttcttggcctttatactatggtggtgcgccatggtggagatttgttagacacacatcatcaggttgcgcgcaattcgctacgctaccaatactgtgcgcttttaaaaccgatccttcggttaagcgacagtattggtgctacgctgaagtgtcacaaccaaatacaagaatagttagcaagaaatctatcc

SEQ ID NO: 18735 - RNA, 200 nt, unidentified
  source 1..200: mol_type = other RNA; note = Related to NZ_AP024849.1; note = Clostridium sp.
ttgatagatttcttggcctttatgctgtggtgttgcgccatagttgagatttgttagaaacacatcatcaggttgcgcgcaattcgcttcgctaccactactgtgcacattaaaaaccgatccttcggttatgtgacagtagtggtgctacgctgaagtgtcccaaccagatataagaatagttagcaagaaatctatcg

SEQ ID NO: 18736 - RNA, 200 nt, unidentified
  source 1..200: mol_type = other RNA; note = Related to NZ_LZZM01000063.1; note = Clostridium puniceum
aagatagatttcttggcctttatgctgtggtgttgcgccatggttgagatttgtcacatacacaacattaggttgcgcgcaattcgctgcgctaccactactgtgcacatttaaaatcgagccttcggttatgtgacagtagtggtgctacgctgaagtgtctcaaccaaatatgagaatagttagcaagaaatctatca

SEQ ID NO: 18737 - RNA, 209 nt, unidentified
  source 1..209: mol_type = other RNA; note = Related to NC_015275.1; note = Cellulosilyticum lentocellum
gtgtactataaatttcttggcctttatgctacggtgtttcgccgtggtgcgtcatatagcttacatacttcactaggctctgcgcaattcgctacgctgccactactgtgcacatttaaaacctatcctgcggttatgtgacagtagtggcgctacgctgaagtgtcataacctaatcattggcttgttagcaagaaatttatagatca

SEQ ID NO: 18738 - RNA, 199 nt, unidentified
  source 1..199: mol_type = other RNA; note = Related to NZ_FQZB01000006.1; note = Clostridium cavendishii
gtagtaaacttcctggcctttatgcttcgatgtttcgtcgaggtcgagatttatatgccatacatcaccaggttacgcgcaattcgctacgctaccactactgtgcgactttaaaatctatcctacggtttgtcgacagtagtggtgctacgctgaagtgtcataaccagatataagattgttagcaggaagtttatta

SEQ ID NO: 18739 - RNA, 206 nt, unidentified
  source 1..206: mol_type = other RNA; note = Related to JAAYMT010000202.1; note = Clostridiales bacterium
aaagataacagttcccttggccttattgctgcggtgcttcgccgtggtggacatatgctaagcatacatcaccagcttgtgcgcaattcacttcgcaccactattgtgcacattgagaatggatccttcggctatgtgacaatagtgttgctacgctgaagtgtcacaagcagatagaagtttgttagcaagggaactgttttttt

SEQ ID NO: 18740 - RNA, 200 nt, unidentified
  source 1..200: mol_type = other RNA; note = Related to JACMJL010000131.1; note = Clostridiaceae bacterium
gtaatatactccttggcctttatacctcggcgctgcgccgcggttgagatttaccatacatacatcatcaggttctgcgcaattcgcttcgctactactactgtgcccatttaaaaaggatccttcggttttgggacagtagtagtgctacgctgaagtgtcaaaaccagataggagagtagttagcaaggagtctattg

SEQ ID NO: 18741 - RNA, 198 nt, unidentified
  source 1..198: mol_type = other RNA; note = Related to JAFGGO010000116.1; note = Candidatus Lokiarchaeota archaeon
atattggatttcttggccttcacgcctcggcgttgcgccgcggtcgaaacttgccaagcacacgacacctgggcgtgcgcaactcgcgtcgctacatatagtgtctgattgaaaatggagccttcggtgatcagacactatatgcgctctgctgaagtgtcactcccaactgtgagaaagttagcaagaaatccatta

SEQ ID NO: 18742 - RNA, 248 nt, unidentified
  source 1..248: mol_type = other RNA; note = Related to NZ_JAALJI010000007.1; note = Paludisphaera sp.
tcctggaaggtctcttctagctcggtgccctgcaccggggcggcgttgcgccgcccgagtttttcgccgaacatccgtcacaacgaaggctgtttcagactcgcttctcggtgggagtacccctcccggcggggcgggtctgggacaaccccgccggacggggttccgccccgccgggaggggtactcccaccggcgagtcagagagccttcgatgtcccaggtcttgtggtagacggaccgaccagg

SEQ ID NO: 18743 - RNA, 251 nt, unidentified
  source 1..251: mol_type = other RNA; note = Related to NZ_JAHPZK010000021.1; note = Paludisphaera sp.
gtcctgaagaggtctgtgctagctcgacgccctgcgtcggggcggcgttgcgccgcccgagtttcacgccgaacatccgtcacagcgaaggctgtttcagactcgcttctcgggggaataacccctccggcgtgggcgggcctggggcaaccccgccggacggggttccgcccacgccggaggggttattcccccggcgagtcagagagccttcgatgtcccaggttttgtggtagacgaacctctcagga

SEQ ID NO: 18744 - RNA, 244 nt, unidentified
  source 1..244: mol_type = other RNA; note = Related to NZ_WEZF01000007.1; note = Tautonia sp.
gattggagaacaggtctagctcgacgcttcggcgtcggggcggcgttgcgccgcccgtggaaacgatccgcttcgcatcacaacgaaggctgtttcaggcccgctgatcgccccgggggtgattaccttgtcggcgggcctggtccaaccgcgccgatcgcggttccgccgacaaggtaatcacccccggggcggcgggccagtgagccttcgatgtcccaggtctggtagtagactctccaat

SEQ ID NO: 18745 - RNA, 221 nt, unidentified; identical to SEQ ID NO: 18713
  source 1..221: mol_type = other RNA; note = Related to NZ_CP036426.1; note = Tautonia plasticadhaerens

SEQ ID NO: 18746 - RNA, 245 nt, unidentified
  source 1..245: mol_type = other RNA; note = Related to JAIENG010000522.1; note = Gemmataceae bacterium
ccggagaggacaggtctagctgcggtgcttcgcaccagggcggcgttgcgccgccccggcgtttgctatcccgtgcatcacaaggaaggctgttccagtcccgctgtcggcctacgccgaacatgttcacggtcgggctgggacaacctcgcagacgtggttccgaccatgaacatgttcggcgtaggccggcgtgactgtgagccttccgtgtcccaggtcgggtaagtcgagatgcctctccg

SEQ ID NO: 18747 - RNA, 242 nt, unidentified
  source 1..242: mol_type = other RNA; note = Related to JAHQVJ010000095.1; note = Myxococcales bacterium
acggagaggcggaaggtctagccattcggtcggcgttgcgccgcccaggaacaccagcacgcatccttcacaaggaaggctgttccagatcttgattttcggcggtgacgcccctaatcgaggatgggctggttcaacctcgccagtcgcggttccatgcctcgattaggggcgtcaccgccgacaagatcggtgagccttccatgtcccaggtctagcggtagcgaacgcccgcctctccc

SEQ ID NO: 18748 - RNA, 245 nt, unidentified
  source 1..245: mol_type = other RNA; note = Related to LR594586.1; note = Gemmataceae bacterium
ccgtcgagggggccgtccagctcgtcgctctgcgacaggacgatgttgcgtcgtccgagcgtttaccatcccacacagcccgaggaaggctgttccagcaccgctatcggcccgggggcaaccggttcggtcacggtctggagcaaccccgcggttcgtggttccgtgaccgaaccggttgcccccgggccggcggtgccgtgagccttccgcggaccaggtcaggtggtggacgcccctcgatg

SEQ ID NO: 18749 - RNA, 213 nt, unidentified
  source 1..213: mol_type = other RNA; note = Related to NZ_JAGKQQ010000001.1; note = Gemmata sp.
acggtgtccgtcgcgatccgagaccaccatgctgcgatgttccgtcgcggttgaagttgctcgcgattgcgtccccaggtgcgttgttcttgttcgcccgccccggaccggtcgggccgaactgaatcgacccgagtcctcggcccgaccggtccggggcgggcgtcgtgaacgcatctggtccacgattgaagtcggttgcggcggacaccg

SEQ ID NO: 18750 - RNA, 247 nt, unidentified
  source 1..247: mol_type = other RNA; note = Related to NZ_JH636447.1; note = Zavarzinella formosa
gcaacgaccttgagtttagctcgctgctttgcagcggggcgatgttgcgtcgcccgagcacatggcttgccatgctacccaaggacggctgttccaggaccgctttcgtgggcgcgccccctgatcacccggtggtctggagcaaccccgcgaatcgtggttccaccgggtgatcagggggcgcgcccacggcggtcccgtgagccgtccatgttccaggtcgagtggtaaacaggtcagcgtgatg

SEQ ID NO: 18751 - RNA, 255 nt, unidentified
  source 1..255: mol_type = other RNA; note = Related to NZ_NIDE01000001.1; note = Fimbriiglobus ruber
gtcggtcgcaggggaaacgatttagcttagttgctctgcaacggggcggcgttgcgccgcccgagcgtatggcttggcatgcgtcccgaggagggctgttccagacccgctttcggtggggggacgaattactccccaccggtctggtgctaccccgcgagtcggggttccggtgaggagtaattcgtccccccaccggcgggtccgtgagccctccacgtcccaggtcgagtagtaaatcacccctgcggccga

SEQ ID NO: 18752 - RNA, 215 nt, unidentified
  source 1..215: mol_type = other RNA; note = Related to NZ_CP036273.1; note = Urbifossiella limnaea
accctgggtcgtcgcgtccgagcctcaccaatgctgcggcgttccgccgcggttgccgatgcttgcgattgcgtcccccgagccgttggtctgttcgccggcacggggtactccccgccggtctgaatcgacctgcgtcaccggcggggagtaccccgtgccggcgtcgtgaacgtctcgggtccacgacagacgtcgggcgcgacgacccagga

SEQ ID NO: 18753 - RNA, 221 nt, unidentified
  source 1..221: mol_type = other RNA; note = Related to CP016211.1; note = Minicystis rosea
gcgaggagatccgaccgcccgagcccatcatgctgcggtgctacgccgtggcggagctcggtctaccatgcgtacccacacccgatattcttttgggcgccgagccccagtcgaaggccgtactcagacgaccgcgagcggtctctgccttcgactggggccggcgcctcggtgatcgggcgtggtcccaagggaagtagtcgggcggtcggatttcctcg

SEQ ID NO: 18754 - RNA, 255 nt, unidentified
  source 1..255: mol_type = other RNA; note = Related to JACKED010000003.1; note = Sandaracinus sp.
acgacgtggtcgggtcgagtctagcttggtgctctgcaccgtggtcggcgttgcgccgcccgagcgtctcgcttcgcatccgtcacaaggaaggctgttccagaacgtcgctatcgggtcatgcaccctctggtggcggcggtctggttcaaccccgctcgtcgtggttccgcgcgccaccagtgggtgcatgacccggcgagttcggtgagccttccgtgtccctggtcgagtcgtagacccccgaccacgccg

SEQ ID NO: 18755 - RNA, 257 nt, unidentified
  source 1..257: mol_type = other RNA; note = Related to JAGQPF010000572.1; note = Planctomycetales bacterium
gaccggcctggcggcacaggtctagcttggtgttctgcaccgtgggcggcgttgcgccgtccgagaggtttcccacgcattgcgtcacaaggaaggctgtttcagactcgctgatcgtcccctcggactactaattcccagcgagactggagcaacctcgccattcgcggttacgccgtgaattagtagtccgaggggacggcgagtcagtgagccttccatgtaccaggtcgtgaagtagattgccccgggccggt

SEQ ID NO: 18756 - RNA, 254 nt, unidentified
  source 1..254: mol_type = other RNA; note = Related to CP042914.1; note = Roseimaritima ulvae
gaatcgtgagagctcaggtctagctaggtgttttacaccgtgggcggcgttgcgccgtccgagagaattgactttcatggggtcacaaggaaggctgtttcagactcgctatcgcccggtaagggtacctattcacggcgagactggagcgacctcgccattcgtggtcacgccgcgaataggtacccttaccgggcggcgagtcagtgagccttccatgtaccaggtcgtgaagtagattgcttttagcgatc

SEQ ID NO: 18757 - RNA, 244 nt, unidentified
  source 1..244: mol_type = other RNA; note = Related to NZ_AP019860.1; note = Candidatus Uabimicrobium amorphum
taaaacttaaaagtttagctcggtagtttaccaagagcggcgtagcgccgttcgagaaaattcttcacattgcagcacaaggaagactgtttcagaacgtcgtgatactagatatagtgtctagtaagcggctgtctgattcaaccgcgccaatcgtagttccgcgcgcttactagacactatatctagtcgagttcagagagtcttccatgtccctagatatgaaagtagacttataagtttt

SEQ ID NO: 18758 - RNA, 237 nt, unidentified
  source 1..237: mol_type = other RNA; note = Related to NZ_FUYB01000016.1; note = Thiothrix eikelboomii
gtgaaaagtctagcgtttgatcttcggatccggttggcgttgcgccacctgtgcattaaaccgagcattgcaacacaaggaagactgtttcagcctcgctattgccctagataacgtaccggagtgggtacgagctgggtcaatcgcgccgccgcaatttcgtacccactccggtacgttatctagggcgcgagtcagtgagtcttccatgtaccaggtattaaggtagatttttca

SEQ ID NO: 18759 - RNA, 237 nt, unidentified
  source 1..237: mol_type = other RNA; note = Related to NZ_AQVE01000007.1; note = Thiolinea disciformis
aagaaaagtctagcgtttgatcttcggatccggttggcgttgcgccaactgtgcgttaaaccaagcattgcaacacaaggaagactgtttcagcctcgtttatgcactcaatttgttatggagagtgctacgagctgggacaattgcaccactgcaatttcgtagcactctccataacaaattgagtgcacgagtcagtgagtcttccatgtaccaggtagtcaggtagatttttct

SEQ ID NO: 18760 - RNA, 241 nt, unidentified
  source 1..241: mol_type = other RNA; note = Related to NZ_KB904782.1; note = Thiofilum flexile
catgaaaagtctagcgattgatcttcggatcaagattggcgttgcgccactctcgaattaaacctaagcattgatcacaaggaagactgtttcagtctcgtttacgcccataaatagtcctcccggcgtactcgagctggaactatcacgcaaacgtgatttcgagtacgccgggaggactatttatgggcacgagccagtgagtcttccatgtacccggtattcaggtagattttttcat

SEQ ID NO: 18761 - RNA, 239 nt, unidentified
  source 1..239: mol_type = other RNA; note = Related to VIAD01000001.1; note = Moraxellaceae bacterium AER2_44_116
aatgaaaattctagcgttaaccttcgggttgaggcggtgatgcgccgcttttgaattaagcttacacattgatcacaaggaagactgtttcagccccgctattgccactaagtacgtgccgtagcagtagcgagctggaacaatcacgcaaccgtgatttcgctactgctacggcacgtacttagtggcgcgggtcagtgagtcttccatgtaccaggtcattcaggtagatttttcat

SEQ ID NO: 18762 - RNA, 247 nt, unidentified
  source 1..247: mol_type = other RNA; note = Related to NZ_CAJHAL010000004.1; note = Psychrobacter nivimaris
gagttgtgagatttagcgtttcaccgtttacggtgaggggcgacgttgcgtcgtccacgagtcaagccattacattttacccaaggaagactgtttcagtcctgctaatacctagataaaggccctagtgtcattagctcgctggcgcaatcacgcaatcgtgattgagctaatgcactagggcctttatctaggtgcagtccagtgagtcttccatgtaccaggtcatgaggtagattacacaaca

SEQ ID NO: 18763 - RNA, 247 nt, unidentified
  source 1..247: mol_type = other RNA; note = Related to NZ_VFYU01000031.1; note = Psychrobacter sp.
tgtgagatttagcgtttcactgcttgcagtgagggacgatgttgcgtcgtccacgagacaagcctgtacatttgacacaaggaagactgtttcagccctactaatacctaatatagccctctagtgtattagttcgctggcgcaatcacgcaaacgtgattgaactaattacactagagggctatattaggtgtaggtcagtgagtcttccatgtacccagttatgaggtaaatcaacaacacacac

SEQ ID NO: 18764 - RNA, 242 nt, unidentified
  source 1..242: mol_type = other RNA; note = Related to NZ_CP047226.1; note = Moraxella osloensis
aagttgtgagatttagcgtttcaccgcaaggtgaagggcgatgttgcgtcgcttatgagtaaagccactacattttgcacaaggaaacctgtttcaggatagctgatacctaaatagggggtctagtgcaatagctcgctggcgcaatcacgcaaacgtgattgagctatagcactagaccccctatttaggtgctatccagtgaggcttccatgtaccatgtcatgaggtaaaccacaact

SEQ ID NO: 18765 - RNA, 254 nt, unidentified
  source 1..254: mol_type = other RNA; note = Related to NZ_NDXW01000001.1; note = Zooshikella ganghwensis
actgtacttgctggtcatggtctagcttggtggaaacaccggggcggtgatgcgccgttcttgcttattgctatgcactgtacacaaggaaggctatttcaggctcgctttgccactatataccgttatggtaaccagcgacctgagccaaccacgcaatcgcggttacgctagttaccataacggtatatagtggcgcgatccagtgagccttccatgtcccaagtcatgaagtagatacacagcaagtagaa

SEQ ID NO: 18766 - RNA, 222 nt, unidentified; identical to SEQ ID NO: 18521
  source 1..222: mol_type = other RNA; note = Related to NZ_CP048878.1; note = Spartinivicinus ruber

SEQ ID NO: 18767 - RNA, 269 nt, Vibrio sp.
  source 1..269: mol_type = other RNA; note = Related to NZ_CP018616.1; note = Vibrio azureus
acttaaagggaatgaagtctagcttatatcattttactgttcgtaaaatgatgtgattggcgttgcgccactcctgtatattctctgacatataacaccaagaagattatttcagcatcacgtgtactccctataggggttaagttacgagatgcctggaacaaccgcgtgaacgcggttgcgatctcgcaacttaacccctatagggagtgtgatgcggtgaatcttctaagtcccaagtctagtagtagaataaatttcgctttagg

SEQ ID NO: 18768 - RNA, 254 nt, unidentified
  source 1..254: mol_type = other RNA; note = Related to JAHBVW010000060.1; note = Deltaproteobacteria bacterium
gagaaggagtcgaggagatcgttagccagcacttcggtgcaagagcggcgtcgcgccgctcgggtacaattactggccattctccacaaggtaggctgttcttggtccgctcgcgcgcggggccccatcgcgcactgctcagctggaccaaccacaccaccgcggtttgagcagtgcgcgatggggccccgcgcgcggcgaaccggtgagcctaccgtgtcccatgagggaggtagcgaccctcgactccttct

SEQ ID NO: 18769 - RNA, 250 nt, unidentified
  source 1..250: mol_type = other RNA; note = Related to VBLP01000042.1; note = Deltaproteobacteria bacterium
gaggaggagtcgaatccgttagccagcgctccggcgcaagggcggcgtcgcgccgtccgggcacaatcaagggccattctccacaaggtaggctgttcttggtctgctcgccctgcaggggtactgcgtacgggctcagctggaccaaccacaccactgcggtttgaacccatacgcagtacccctgcagggcggcagaccggtgagcctaccgtgtcccatgagggatgtagcggattcgactcctcct

SEQ ID NO: 18770 - RNA, 251 nt, unidentified
  source 1..251: mol_type = other RNA; note = Related to JADJJK010000055.1; note = Myxococcales bacterium
aaggagaagctctacccgttagcctgcgcgcaagcgcatgggcggcgtcgcgccgcccgggttcaacaactcgccattctccacaaggtaggctgttcgtggtttgctcggccatcgcccctcctagtagtgggctcagctggaccaaccacgccaccgcggtttgagcccactactaggaggggcgatggccggcaaaccggtgagcctaccgtgtcccatgagggatgtagcgggtcagagcttttcct

SEQ ID NO: 18771 - RNA, 254 nt, unidentified
  source 1..254: mol_type = other RNA; note = Related to JADJUF010000001.1; note = Myxococcales bacterium
caggaagaggagtcgccttcgttagcctgcgctccggcgcaagggcggcgtcgcgccgtcccggcacaagcagtagccactctccacaaggtaggctgttcttggttcgctcgcccagaggggccccaattgtcgggtccagctggaccaaccgagcgaacccggtttgcacccaacaattggggcccctctgggcggcgaacctgtgagcctaccgtgtcccatgagggttgtagcgagcgcctcctcttcct

SEQ ID NO: 18772 - RNA, 251 nt, unidentified
  source 1..251: mol_type = other RNA; note = Related to JADJFN010000004.1; note = Myxococcales bacterium
gaagaggagtcgtcttcgttagcctgcgctccggcgcaagggcggcgtcgcgccgtcccggcacacgcagtagccactctccacaaggtaggctgttcttggttcgctcgcccagaggggccccaattgttgggtccagctggaccaaccgagcgaacccggtttgcacccaacaattggggcccctctgggcggcgaacctgtgagcctaccgtgtcccatgagggatgtagcgagcggcgactcccctt

SEQ ID NO: 18773 - RNA, 252 nt, unidentified
  source 1..252: mol_type = other RNA; note = Related to NZ_PVNL01000069.1; note = Enhygromyxa salina
ccgtggggttgccgggatcgttagccgtgctcagcacagagcggcgttgcgccgctcgggcacactcttccgacactctccacaaggtaggctgttcgtggtttgcctggcctcgtacgcgtcgaagacgtcgacgtggctgggccaaccacgcaaccgtgggtcacgtcgacgtcttcgacgcgtacgaggccgcaaaccggtgagcctaccgtgtcccaagtgggatcgtagcgacacgatgatcccgcg

SEQ ID NO: 18774 - RNA, 193 nt, unidentified
  source 1..193: mol_type = other RNA; note = Related to JAGQIO010000454.1; note = Myxococcales bacterium
tcgttgtcggggatcgttagccgtgctccgcacaggtcggcgcagcgccgtccgggcacattcttccgacattctccacaaggtaggctgttcgtggtttgtctgggtgcccaagccctcgccggagcagcttggctggaccaaccacgcaaccgtgcttcaagctgctccggcgagggcttgggcacccaca

SEQ ID NO: 18775 - RNA, 253 nt, unidentified
  source 1..253: mol_type = other RNA; note = Related to JAEPMI010000008.1; note = Deltaproteobacteria bacterium
ggagggaaggtcgggttcgttagccggtgcttcggcactcgggcggcgcagcgccgccctggcacgacacttcgtcattctccacaaggtaggctgttcgtggttggcctcgggggagggggtatccccgccacccctagctgggccaaccgcgctaccgaggtttaggggtagcggggataccccctcccccgggccaaccggtgagcctaccgtgtcccatgtgagcaggtagcgagcccggcctttcctc

SEQ ID NO: 18776 - RNA, 241 nt, unidentified
  source 1..241: mol_type = other RNA; note = Related to JACKEN010000012.1; note = Deltaproteobacteria bacterium
ggtggaggagtcgttactcgttagcttttgggcggcgtcgcgccgtccaagctcagtcattcggcaatctccacaaggtaggctatgcgtggtttggctcccaccagggggtactagttgtcggcctagctgggccaaccacgcatccgaggttcaggccaacaactagtaccccctggtggggccaaaccggtgagcctaccgtgtcccatgttggaagtggcggtctcggttcctccac

SEQ ID NO: 18777 - RNA, 253 nt, unidentified
  source 1..253: mol_type = other RNA; note = Related to JAHQVK010000212.1; note = Myxococcales bacterium
gggagaaagctcagctggaagtgagtatgtgcttcggcaccaggatggcgtagcgccatctagtctatctaacttagcattctccacaaggtagcctgttctcgtgctaagtgccaccggtactaggggtgtctggcctagctggatcaaccacgcaaccggggtttaggccgagacacccctagtaccggtggcacttagcacggtgaggctaccgtgtccccagtgggaaggtcactgccaggctttctct

SEQ ID NO: 18778 - RNA, 253 nt, unidentified
  source 1..253: mol_type = other RNA; note = Related to JACQYO010000157.1; note = Deltaproteobacteria bacterium
aggagagagagcgggccgctagcttgtgcttcggcacgcgggtggtgttgcgccacccgtgcgtgatggcctgacatgctccacaaggtaggctgttcgtggttgcctcgccaggagagggtcccctctacgggcgtagctggaccaaccacgcaaccgcggtttacgcccgttagaggggaccctctcctggcggtcaaccggtgagcctaccatgtccctcgtgaggaagtagcgaacccgctccctctcc

SEQ ID NO: 18779 - RNA, 254 nt, unidentified
  source 1..254: mol_type = other RNA; note = Related to JACPFK010000066.1; note = Deltaproteobacteria bacterium
gaggagagagagcgggtcgttagctcgtgcttcggcacgcgggcggtgttgcgccgcccgtgcgtgatggcccgacatgctccacagggtaggctgttcgtggttgcctcgccaggagagggtcccctctccgggcgtagctggaccaaccacgcaaccgcggtttacgcccagtagaggggaccctctcctggcggtcaaccggtgagcctaccatgtccctcgtgaggaagtagcgaaccgctccctctcct

SEQ ID NO: 18780 - RNA, 241 nt, unidentified
  source 1..241: mol_type = other RNA; note = Related to JAGQIK010000702.1; note = Myxococcales bacterium
cgggggagagccgggcaaagttagccatttgggcggcgttgcgccgtcctggccttacaactcggttcactccacaaggtaggctattcgtggtttgctcgccccggacgggtactatggggcgggttagctggaccaaccacgcaatcgcggtttaacccaccccatagtacccgtccggggcggcaaaccggtgagcctaccgtgtcccaggtgggaaagtagcttccggctcttcccc

SEQ ID NO: 18781 - RNA, 253 nt, unidentified
  source 1..253: mol_type = other RNA; note = Related to JAIOJK010001035.1; note = Sandaracinaceae bacterium
tcgaggagagtcggggccgttagcccgtgcaaccgcacgcgggcggcgtctcgccgcccaggcccattcgcagagcatccgccacaaggtaggctgtgcgtggttcggctgccaggagggggtcctgatcacctcccctgctggtccaaccccgcatccgtggtttggggaggtgatcaggaccccctcctggcgccgaaccggtgagcctaccgtgtcccatgtaaggacgtagcggtcccgactctcctcc

SEQ ID NO: 18782 - RNA, 253 nt, unidentified
  source 1..253: mol_type = other RNA; note = Related to NC_013440.1; note = Haliangium ochraceum
ggagcgggactcggaagcattagcctgtgcttcggcacacgggcggcgttgcgccgtctaggcttaatctcgacacactcgccacaaggtaggctatgcgtggtttctctaccccaatgggcccctgctcccggggatagctggaccaaccacgcaatcgcggtttatccccaggagcaggggcccattggggtgagaaaccggtgagcctaccgtgtcccatgtaggatggtagtgattccgagttcctctc

SEQ ID NO: 18783 - RNA, 241 nt, unidentified
  source 1..241: mol_type = other RNA; note = Related to JAESTW010000770.1; note = Kofleriaceae bacterium
ggagaagggattgggaaaaagttagccatcgggcggcgtagcgccgtccaggtacagtcttcggacaatcgccacaaggtaggctattcatggtgaatctcccctataggggtacctgcaccacggatagctggaccaacctcacaactgcggtttatccgtagtgcaggtacccctatagggggattcaccggtgagcctaccgtgtcccgtgtaggatagtagctctcaatcccttctc

SEQ ID NO: 18784 - RNA, 253 nt, unidentified
  source 1..253: mol_type = other RNA; note = Related to PABA01000191.1; note = Sandaracinus sp.
ggaggggaggacggagccattagcccgtgctcgtcacgggggcggcgcagcgccgtccaggcaacgcattccgacaatctccacaaggtaggctgttcgtggttggcactcgggggagggggtaccgtcggcccccctagctggaccaaccacgccaccgcggtttaggggggccgacggtaccccctcccccgggccaaccggtgagcctaccgtgtcccaggtgagaaggtagcggctccgccctcccctc

SEQ ID NO: 18785 - RNA, 255 nt, unidentified
  source 1..255: mol_type = other RNA; note = Related to JACKDV010000022.1; note = Myxococcales bacterium
ggagagggaaccgagctcgttagccacgtgcttctgcacacgggcggcgctgcgccgccccggttcaacatcactgcatcactccacaaggtaggctgttcgtggtttgtcaggtacggagggggtcgtagcgaccgggttatctggaccaaccacgcagccgtcgttcaacccagtcgctacgaccccctccgtaccacaaaccggtgagcctaccgtgtcccgtgtcgagcagtagcgtctcggttccctttc

SEQ ID NO: 18786 - RNA, 254 nt, unidentified
  source 1..254: mol_type = other RNA; note = Related to JAGQIQ010001415.1; note = Myxococcales bacterium
ggagagggaaccgagttcgttagccacgtgctttgcacatgggtggcgctgcgccaccccggtccaacatcactgcatcgctccacaaggtaggctgttcgtggtttgtcaggtacggagggggtcctagcgaccggattatctgggccaaccacgcaaccgtcgttcaatccagtcgctaggaccccctccgtaccacaaaccggtgagcctaccgtgtcccgtgtcgagaagtagcgtctcggttccctttc

SEQ ID NO: 18787 - RNA, 256 nt, unidentified
  source 1..256: mol_type = other RNA; note = Related to NZ_RAVZ01000142.1; note = Corallococcus terminator
gagagaggtctggaccgcatcagccttagcgcctcgagcgcgggagcggcgttgcgccgctctggttgaaatgctggacactctccgcaaggtagcctgttcttggctctctccctccggtgcactggtggccgggtgggaagcggaaccaacgacgcaaccgccgttttcccacccggccaccagtgcaccggaggggagagccggtgaggctaccgtgccccaggtgagctggtggtgcattcctggcctccct

SEQ ID NO: 18788 - RNA, 256 nt, unidentified
  source 1..256: mol_type = other RNA; note = Related to NZ_FOIB01000017.1; note = Myxococcus fulvus
gagagaggtctggagtgcatcagcctgagcgcctcgagcgcgggagcggcgttgcgccgctccggtttgaatgcaggacactctccgcaaggtagcctgttcttggctctctccctcccatgcactacggccggggtgggcagcggagccaacgacgcgaccgccgtttgcccaccccggccgtagtgcatgggaggggagagccggtgaggctaccgtgccccaggtgagatggtggtgctttcctggcctccct

SEQ ID NO: 18789 - RNA, 256 nt, unidentified
  source 1..256: mol_type = other RNA; note = Related to JABBJJ010000287.1; note = Pyxidicoccus fallax
gagagaggtctggagtgcatcagcctgagcgcctcgagcgcgggagcggtgttgcgccgctccggttggaatgcaggacactctccgcaaggtagcctgttcttggctctctccctcctaggcaccatggcccgggtgggtagctgagccaacgacgcgaacgccgtttacccacccgggccatggtgcctaggaggggagagccggtgaggctaccgtgccccaggtgagatggtggtgccttcccggcctccct

SEQ ID NO: 18790 - RNA, 256 nt, unidentified
  source 1..256: mol_type = other RNA; note = Related to NC_020126.1; note = Myxococcus stipitatus
gagagaggtccggagtgcatcagcctgagcgcctcgagcgcgggagcggcgttgcgccgctccggttggaatgcaggacactctccgcaaggtagcctgttcttggctctctccctcctaggcactgcggccggggcgggcagcggagtcaacgacgcgaccgccgttcgcccgccccggccgcagtgcctaggaggggagagccggtgaggctaccgtgccccaggtaagatggtggtgctttcccggcctccct

SEQ ID NO: 18791 - RNA, 256 nt, unidentified
  source 1..256: mol_type = other RNA; note = Related to NZ_JAHNZT010000021.1; note = Citreicoccus inhibens
gagagaggtccggagcgcatcagccttagcgcctcgagcgcaggagcggcgttgcgccgctctggttgaaatgcaggacactctccgcaaggtagcctgttcttggctctctccctcctaggcaccatggccacggcgggaagcggagccaacgacgcgaccgccgttttcccgccgcggccatggtgcctaggagggaagagccggtgaggctaccgtgccccaggtgagatggtggtgctttcccggcctccct

SEQ ID NO: 18792 - RNA, 257 nt, unidentified
  source 1..257: mol_type = other RNA; note = Related to NZ_JPMI01000131.1; note = Archangium violaceum
cgagagaggtccggaaagcatcagccttcgcgcctcgagcgcgggagcggcgctgcgccgctctggaagcaatgcaggacactctccgcaaggtagcctgttcttggcgctctcccggtagaggggtctaggcctctcggggagctgagccaacgacgcaaccgccgtttccccaagaggcctagacccctctaccggggagcgccggtgaggctaccgtgccccaggtgagcatgtggtgattccaggcctctctc

SEQ ID NO: 18793 - RNA, 257 nt, unidentified
  source 1..257: mol_type = other RNA; note = Related to NZ_JAHXBG010000001.1; note = Cystobacter gracilis
gggagaggtcccaaagccatcagcctcagcgcctcgagcgcgggagcggcgttgcgccgctctggatgcaatgcaggacactctccgcaaggtagcctgttcttggctctcttccctcgatcagtactatgacggggtgtagagctgagccaacgacgcaaccgccgtttctccaccccgtcatagtactgatcgaggggagagccggtgaggctaccgtgccccaggtgagcaggtggtgccttgggggcctccct

SEQ ID NO: 18794 - RNA, 257 nt, unidentified
  source 1..257: mol_type = other RNA; note = Related to NZ_FOAP01000003.1; note = Stigmatella aurantiaca
cgagagaggtcccaagccatcagcctcagcgcctcgagcgcgggagcggcgttgcgccgctctggttgaaaagcaggacactctccgcaaggtagcctgttcttggctctcttccctccggtactgccctcccgggccggggagctgagccaacgacgcgaccgccgttcccccggcccgggagggcagtaccggaggggagagccggtgaggctaccgtgccccaggtgagaaggtggtgcctttgggcctccctc

SEQ ID NO: 18795 - RNA, 256 nt, unidentified
  source 1..256: mol_type = other RNA; note = Related to JACSRE010000153.1; note = Myxococcus sp.
gagcggggtgtcgagatcttcagccttcgcgcttcagtgcgcaggagcggcgttgcgccgctctggagaatcgtccgacatccatcgctaggtagcctgttcttggctctcctcggcagaggggcatcctccgcgtgggagagctgagacaactgcgcgaacgcagtttctcccacgcggaggatgcccctctgccgggagagccggtgaggctaccgagccccaggagagaaggtggtgctttcggcgccccact

SEQ ID NO: 18796 - RNA, 256 nt, unidentified
  source 1..256: mol_type = other RNA; note = Related to JAGNNG010000134.1; note = Deltaproteobacteria bacterium
ggagaggtaccgagcgcttcagcctaagcgcctagagcgcaggaacggtgttgcgccgttctggtcgaactgctggtcaatctccgcaaggtagcctgttcttggttcgctctagctacacccctcggcgtgcagctagtatctgaatcaacgacgccaaccgccgtttactagctgcacgccgaggggtgtagctaggcgaaccggtgaggctaccgtgccccaggtgagaaggtggcgctgctcggcgcctccc

SEQ ID NO: 18797 - RNA, 250 nt, unidentified
  source 1..250: mol_type = other RNA; note = Related to NZ_ASRX01000060.1; note = Chondromyces apiculatus
gaggtactgaacgcaccagactccgcgccttgagcgcaggagcggcgtcgcgccgctctggagtaaccactggtcattctcagcaaggtagcctgttcttggttctcttcggcgctacgcgctctacggcgccgggagatctgagacaacgcctcgaccgccgtttctcccggcgccgtagagcgcgtagcgccggagaaccggtgaggctaccgtgccccaagagaagaaggtgatgcgttcagcgcct

SEQ ID NO: 18798 - RNA, 219 nt, unidentified
  source 1..219: mol_type = other RNA; note = Related to NC_010162.1; note = Sorangium cellulosum
gcaaggagatccgtccgctcgagcccaacatgctgcggcgctccgccgtggtggaggttgttcttccatgcatccccacccccgatgttctttgggcgcctttagcacctgcgcggttccactcagagggacctgacggtcctggaaccgcgcaggtgcccggcgcctgggtgatcgggcgtggtcacgagcaagtagtcgggcgggcgggcctccttg

SEQ ID NO: 18799 - RNA, 258 nt, unidentified
  source 1..258: mol_type = other RNA; note = Related to JADLAG010000095.1; note = Polyangiaceae bacterium
aggagaggttttgaacgcaccagcctccgcgcctcgagcgcaggagcggcgccgcgccgctctggaggaaccgctcgacattctccgcaaggtagcctgttcttggttctcttcggcatagccggctctactacgccgggagagctgagacaacgtcacgaccgccgtttctcccggcgtagtagagccggcgatgccggagaaccggtgaggctaccgtgccccaagaatagatggtgatgcgctcaatacctctct

SEQ ID NO: 18800 - RNA, 256 nt, unidentified
  source 1..256: mol_type = other RNA; note = Related to JABWBE010000187.1; note = Polyangiaceae bacterium
aggagaggttctgaagcaccagcctccgcgccttgagcgcaggagcggcgccgcgccgctctggaggatccgccagacactctccgcaaggtagcctgttcttggttctcttcgccggtagagcatccctagcgcggggagagctgagacaacgacccgactgccgtttctccccgcgctagggatgctctaccggcggagaaccggtgaggctaccgtgccccatggtagaaggtgatgctttcggggcctctct

SEQ ID NO: 18801 - RNA, 257 nt, unidentified
  source 1..257: mol_type = other RNA; note = Related to JADJRH010000001.1; note = Polyangiaceae bacterium
gtgaggcgcaaatgcgcaccagcctacgcgccttgagcgcaggagcggcgtcgcgccgttctggaaacaccgcctgtcattgttccgcaaggtagcctgttcttggttctcttcgcgctccccacccctgaagcgcgcggagagctgaaccaacgacgcagaccgccgtttctccgcgcgcttcaggggtggggagcgcggagaaccggtgaggctaccgtgccccatgggagaaggtgatgcgacttttcgcctct

SEQ ID NO: 18802 - RNA, 242 nt, unidentified
  source 1..242: mol_type = other RNA; note = Related to NZ_CBTJ020000010.1; note = Candidatus Competibacter denitrificans Run_A_D11
agcgtgaggcgttcctccattagccgtttgggcggcgttgcgccgtccgggatttccaacgccacacacgccacaaggtaggctgttcttggcccgcttcgcctaataccgtgccggtagcatggcggagctgggccaaccacgccaccgcggtttccgccatgctaccggcacggtattaggcggcgggccggtgagcctaccgtgtcccttgtgagaagtagcggtttgcgccctcacgc

SEQ ID NO: 18803 - RNA, 243 nt, unidentified
  source 1..243: mol_type = other RNA; note = Related to CP065007.1; note = Candidatus Competibacteraceae bacterium
gagcgtgaggcgttcctccattagccttttgggcggcgttgcgccgtccgggaattccaacgccacacacgccacaaggtaggctgttcttggccagcttcgccagtacccgcccctagttgtcggcggagctgggccaaccacgccaccgcggtttccgccaacaactaggggcgggtactggcggctggccggtgagcctaccgtgtcccttgtgagaagtagcggtttgcgcctcacgct

SEQ ID NO: 18804 - RNA, 211 nt, unidentified
  source 1..211: mol_type = other RNA; note = Related to JAFKJJ010000105.1; note = Planctomycetes bacterium
aaggtgtccgtcgcgagccgagaccttctctgcggcgttccgccgcgggtgagtttgcttgcgattgcgtccccgggcgcgttgttcttgttcgccgaccgtcacgcgcggtcgccggactgaatcaacctgcgttcacgccgaccgcgcgtgacggtcggcgtcgtgaacgcacccggtccacggatgaagtcggtcgcgacggacaccg

SEQ ID NO: 18805 - RNA, 211 nt, unidentified
  source 1..211: mol_type = other RNA; note = Related to VGZJ01000002.1; note = Planctomycetes bacterium
accaagcggccggctccgagacttaaacgtcctgcggcgttccgccgcgggtgaagtcgccagcgattgcgcccccgagcgcgttgttcttttcgcctccagaaataggtagttggcgaactgaaccgacctgcgttttcgccaactacctatttccggaggcgtcgtgaacgcgctcggtccgggtcggaagtcggagccggccgctttg

SEQ ID NO: 18806 - RNA, 213 nt, unidentified
  source 1..213: mol_type = other RNA; note = Related to PNKH01000071.1; note = Isosphaera sp.
tcttcgggtggccggtgtccgagacttcctctgcggcgctccgccgcgggtgacgttggcttgcgatgcgtccccagagccgttggtcttttcgccgggatattcacccccgggcgggactgagccaaccagcgttccccgcccgggggtggatatcccggcggtcgtgaacgactctggtcccggatcgaagtcggacccggccacccgttg

SEQ ID NO: 18807 - RNA, 213 nt, unidentified; identical to SEQ ID NO: 18749
  source 1..213: mol_type = other RNA; note = Related to NZ_JAGKQQ010000001.1; note = Gemmata sp.

SEQ ID NO: 18808 - RNA, 219 nt, unidentified
  source 1..219: mol_type = other RNA; note = Related to JAIEQO010000648.1; note = Gemmataceae bacterium
aacttgggcggccggttcccgagcctcaccactgctgcggcggtccgccgcggtttggagtcgcttgcgattgcgtccccggaggcgttggtcttttcgcccgagagttcaagggaggggcggactgtgccaacctgcgtatccaacccctcccttgaactctcgggcggtcaggaacgcccccggtcggcggatgaagtcggggccggccgcccttga

SEQ ID NO: 18809 - RNA, 215 nt, unidentified; identical to SEQ ID NO: 18752
  source 1..215: mol_type = other RNA; note = Related to NZ_CP036273.1; note = Urbifossiella limnaea

SEQ ID NO: 18810 - RNA, 209 nt, unidentified
  source 1..209: mol_type = other RNA; note = Related to LSTD01000254.1; note = Planctomycetaceae bacterium SCGC AG-212-F19
tgggggcgtgcagcttcgagaccatcttgctgcggtgttccgccgcggttgacgttggcttgcgttgcatccccagggccgttgttcttttggctggccaccgaggggttgcggcctgcctgagacaacacggtcgcggccgcaacccctcggtggccagccgtgtgaacgtccctggtcggcgcctcgaagtcgaagctgccgccccc

SEQ ID NO: 18811 - RNA, 215 nt, unidentified
  source 1..215: mol_type = other RNA; note = Related to NZ_LR593887.1; note = Tuwongella immobilis
ttgcgattcactctccttgcgagacgattctcaggtgttccgcctgggttgaagttgcctgcgattgcgttctccaagccgttgttctttttgcccacatgcccggcaccggcgggtaggctgagccaacggatgttttgcccgccggtgccaggcatgtgggctcggtgaacgtcttggatcctgacttggaagtcgcaaggtggtgcgtcgcg

SEQ ID NO: 18812 - RNA, 218 nt, unidentified
  source 1..218: mol_type = other RNA; note = Related to NZ_JAALJH010000005.1; note = Aquisphaera sp.
agggtggccgggccggagctcgagaccaccttgccgcggcgatccgccgcggtcgaccttgccccggagaatgcttccccagcgccgttgttcttttcggccggcggacctacccgcgggccgtgctgagtcgacgtgtccctgcccgtgggtaggtccgccggcctcggtgaacgacgctggtcggcgcctcgaagtcgggtccggcccgtcctccc

SEQ ID NO: 18813 - RNA, 218 nt, unidentified
  source 1..218: mol_type = other RNA; note = Related to NZ_CP042997.1; note = Aquisphaera giovannonii
agggtggccgggccggagcccgagaccatcttgccgcggcgatccgccgcggtcgaacgtgacccggagaatgcttccccagcgccgttgttcttttcggcaacaggggctccctgcaggccgagctgagtcgacaggtccctgcctgcagggagcccctgttgccttggtgaacgacgctggtcggcgcctcgaagtcggggccggcccgtcctccc

SEQ ID NO: 18814 - RNA, 218 nt, unidentified
  source 1..218: mol_type = other RNA; note = Related to NZ_JAHPZK010000060.1; note = Paludisphaera sp.
agggcgtccgggtcgtttccgagaccaccctgctgcggcgttccgccgtggccgaccttgcctccgtcgttgcttccccgagagcgttgttcttttggcccggtggagagctctcccgccgggctgagtcgaccgatgtccccggcgggagagctctccaccgggcctcggtgaacgccctcggtcgtcgcctcgaagtcggagcggcccggacgccc

SEQ ID NO: 18815 - RNA, 215 nt, unidentified
  source 1..215: mol_type = other RNA; note = Related to NZ_JAALJI010000068.1; note = Paludisphaera sp.
tcgaggcgggtcgtcgtcgagaccaccctgccgcggcgctccgccgcggccgagcttgccgcccgcgttgcttccccgagcgcgttgttcttttggcccggtgcgagtacctcacgccgggctgagtcgaccgaagtccccggcgtgaggtactcgcaccgggcctcggtgaacgccctcggtcgtcgcttcgaagtcggcggcggcccgcctcg

SEQ ID NO: 18816 - RNA, 213 nt, unidentified
  source 1..213: mol_type = other RNA; note = Related to CP003364.1; note = Singulisphaera acidiphila
gaggcgggccggggcccgagaccagcatgctgcggcgttccgccgtggtcgactctgcccccgagactgcttccccaagagtgttgttcttttggcccggggccgtagccgtacgccgggctgagtcaaccgttgttcccggcgtacggctacagccccgggcctcggtgaacacccttggtcgtcgcttcgaagtcgggcaacggcccgtcc

SEQ ID NO: 18817 - RNA, 217 nt, unidentified
  source 1..217: mol_type = other RNA; note = Related to JAIEMG010000080.1; note = Gemmataceae bacterium
agggggtgttccgacggtgttccgagaccatcttgctgcggtgttccgccgcggttgacgttggctcgtgcatgcttccccaaggccgttgttcttcaggcccgtccgcacgctcgcgggcgggctgaggcaacgagttcccgcccgcgagcgtgtggacgggcctcggtgaacgaccttggtcggcgcctcgaagtcggacctgtcgggcacccct

SEQ ID NO: 18818 - RNA, 214 nt, unidentified
  source 1..214: mol_type = other RNA; note = Related to JAJKFQ010000002.1; note = Stieleria sp.
gaggagtgaatcgacgatcgagcctaatttgctgtggtgctacgccatggtgtgagcttgctttgctatgcttccccaagcccgttgttcgttcgccagatacgacaccgtatcggcggactgagtcaacaaggttttcgccaatacggtgtcgtatctggcttggtggaacgtccttggtcaacgcgttgaagtcggtcgctcggacactcct

SEQ ID NO: 18819 - RNA, 214 nt, unidentified
  source 1..214: mol_type = other RNA; note = Related to PPHI01000001.1; note = Rhodopirellula baltica
gaggagtgcgtcgtcgaccgagactaatttgctgtggtgttacgccatggtttgagattgcttcgccatgcttccccaaagccgttgttcgttcgccagagactacaccgtagcggcgaactgaagcaacgaggtttacgccgctacggtgtagtctctggcttgggtgaacgaccttggtcaacgcgttgaagtcggtcgcacgaacactcct

SEQ ID NO: 18820 - RNA, 213 nt, unidentified
  source 1..213: mol_type = other RNA; note = Related to NZ_VSZO01000001.1; note = Proposed Roseiconus lacunae
gaggagtgaatcgacgaccgagactaatttgctgtggtgatacgccatggtgtgagattgctttgcgatgctttcccaaagccgttgttcgttcgccagatacgacaccgtagcggcggactgaatcaacacgtttacgccgctacggtgtcgtatctggcttgagggaacgaccttggtcaacgcgttgaagtcggtcgcacgagcactcct

SEQ ID NO: 18821 - RNA, 208 nt, unidentified
  source 1..208: mol_type = other RNA; note = Related to NZ_SJPM01000010.1; note = Rhodopirellula pilleata
ttcgtgaagcccaaccgagacctgtttgctgcggcgttccgccgtggtgcgagtttgcttggacatgcttccccaaggacgttgttcgtttcgccgatgacggtatctgtccggtgaactgaggcaacgtggtttcaccagacagataccgtcatcggcttggtgaacgcccttggtcgatccttcgaagtcggttgcggtttcgcga

SEQ ID NO: 18822 - RNA, 217 nt, unidentified
  source 1..217: mol_type = other RNA; note = Related to JAGQQE010000043.1; note = Planctomycetaceae bacterium
agaaggaggaagagcgactaccgagactaatttgctgcggtgttccgccgtggtgcgagtttgccttcacatgctttcccgaggtcgttgttcgttcgccagacacgtcattgtgccggcgactggagcaacgaggttttcaccagcacaatgacgtgtctggcttgagtgaacgccctcggtcggcccttcgaagtcggtactgttcatctccttc

SEQ ID NO: 18823 - RNA, 215 nt, unidentified
  source 1..215: mol_type = other RNA; note = Related to NZ_SJPW01000002.1; note = Rubripirellula tenax
gagaggagagtggacacgatcgagaccaatttgctgcggcgttccgccgtggtttgagtttgctttgacatgcttccccaaggccgttgttcgatcgccggatacaccactgtatcggcgggccgagacaacgtggttccctccgatacagtggtgtatccggctgagtgaacgaccttgggcggcgcttcgaagtcgatcgtgccgctacctct

SEQ ID NO: 18824 - RNA, 213 nt, unidentified
  source 1..213: mol_type = other RNA; note = Related to JAEUIP010000375.1; note = Planctomycetaceae bacterium
gaggggtttgggttcgaaccgagactattttgctgtggtgttccgccatggttgagtttgctttgacatgctttcccaaggccgttgttcgttggcccgaccgcgatactagtcggcggctgggacaacgggtttcctccgactagtatcgcggtcgggcttgagtgaacgtccttggtcgacgcttcgaagtcggcgcagtcctgaacccct

SEQ ID NO: 18825 - RNA, 215 nt, unidentified
  source 1..215: mol_type = other RNA; note = Related to DQCF01000782.1; note = Planctomycetaceae bacterium
caggtggggtgggcttgaacacgagactgtcctactgcggtgttccgccgcggttgaaactggcctgagattgcttcaccgtggacctgtcggcctggcccgctcaaggtctctggctgcgaccaattcgacgtggtctcgccgccagagcccagagcgggccgtacgtcagggtctgcggtcgacacttcgaagtcgcgaacactcgcccccct

SEQ ID NO: 18826 - RNA, 212 nt, unidentified
  source 1..212: mol_type = other RNA; note = Related to JAEUII010000041.1; note = Planctomycetaceae bacterium
gagaacagaacatttaccgagactaatatgctgcggtgttccgccgtggttgagtttggctcctcattgcttccccaggaacgttgttctttcggcccgaggtcatctgacccgcgcagctgagtcaacgtggttcacgcaggccagatgacctcgggcctttgtgaacgctcccggtcgacgcttcgaagtcggtgagtttgttctgttcc

SEQ ID NO: 18827 - RNA, 206 nt, unidentified
  source 1..206: mol_type = other RNA; note = Related to JADZDL010000180.1; note = Planctomycetes bacterium
gcacagcaccatgtctgagactcctctgcggcgttccgccgcggatgccctttgactgcccacgcttccccaaggtcgttgttcggtttgccgctatcgcaccgatgcgcgcctaccgagcacaggaccgaggcctttgtcgcacatcggtgcgatagcggctttggtgaacgaccttggtccatggtctgaagtcaggcgctgtg

SEQ ID NO: 18828 - RNA, 204 nt, unidentified
  source 1..204: mol_type = other RNA; note = Related to JAEUHU010000483.1; note = Planctomycetes bacterium
gcacagcccacgtctgagactcctctgcggcgttccgccgcggatgccccacgactccccacgcttccccaaggtcgttgttcggtttgccgctgccgcacctgtgcgcggcgaccgagcacagtccgaggcctttgccgcacacaggtgcggcagcggcttgggtgaacgaccttggtccatggtctgaagtcaggcgctgtg

SEQ ID NO: 18829 - RNA, 210 nt, unidentified
  source 1..210: mol_type = other RNA; note = Related to CADCUQ010000908.1; note = Phycisphaerae bacterium
cacccggtcggccggacgagaccttttctgcggcgatccgccgcgggcgacgtcggccacccatgcgaccccaaggccgttgctcgtttcggcctccggcgacagcctcgccggaccgaagcgagccgaggctctcccggcgaggctgtcgccggaggccttgagtgaacgcccttggtccgaggcgtgaagtcggccgtccggccgggt

SEQ ID NO: 18830 - RNA, 210 nt, unidentified
  source 1..210: mol_type = other RNA; note = Related to NZ_CP063458.1; note = Proposed Humisphaera borealis
ccctggtccggccggccgagaccttttctgcggcgttccgccgtggtcgcggtcggctacccatgcaaccccagacccgttgctcgtttcggcaatcgacgccaccgtcggcggaccgaaacaagcgcgaggctttcccgccgacggtggcgtcgattgccttgagtgaacggccctggtcccaggcgtgaagtcggccggccggccagg

SEQ ID NO: 18831 - RNA, 216 nt, unidentified
  source 1..216: mol_type = other RNA; note = Related to JACQZM010000063.1; note = Candidatus Riflebacteria bacterium
acggcggccttcagctgcctgagaccatcttgctgcggcgttccgccgcggtcgcgatcggcaagacatgcatccccgaggccgttgttcgttttggccacctgtgctaccgcacgggggccgaaacaagccgaggcttccccccgtgcggtagcacaggtggccttggtgaacgtcctcggtcctggtggaaagaagtcaggccgtcggccgccc

SEQ ID NO: 18832 - RNA, 216 nt, unidentified
  source 1..216: mol_type = other RNA; note = Related to JACPRC010000003.1; note = Planctomycetes bacterium
atgcgggggtcatctcccatcgagactgttctgcggtgaatcgccgcgggtgaagatggccagacgtgcgtccccggggccgttgttctttaggctgatccctccggtgcggatggactcagccaagccggggcttctccctaaccgcaccggagggatcagcctcggtgaacgtccccggtcctcggagtgaagtcggggggaatggcccccgca

SEQ ID NO: 18833 - RNA, 214 nt, unidentified
  source 1..214: mol_type = other RNA; note = Related to JACQFK010000217.1; note = Planctomycetes bacterium
cgggggccgtctccctttcgagactgttctgcggcgtaccgccgcggttgaagtcggcctcccatgcatccccggagccgttgtgctttaggctcgtccgacatctcgcgtttggactgagccaagccgaggcttttccccacgcgagatgtcggacgagcctcggtgaacgtctccggtcctgagtgcgtagtcgagagggagcacggctccc

SEQ ID NO: 18834 - RNA, 222 nt, unidentified
  source 1..222: mol_type = other RNA; note = Related to JAGQQS010000445.1; note = Planctomycetaceae bacterium
gagcagggcagagcagttttctaagaccatcctgctgcggcgatacgccgtggttgagttttctttccaattcgtccccagagtcgttgtgcgttcggccagcaattgactgccaccgggcgaccacagcaagcacaaggctttcgcccggcggcagtcaattgctggcccttgtgaacgcctctggtccgcagatcgaagttagaaaatgcctgccctgct

SEQ ID NO: 18835 - RNA, 215 nt, unidentified
  source 1..215: mol_type = other RNA; note = Related to QWOO01000305.1; note = Planctomycetes bacterium
caggagagagcaacgttctaagaccctcttgctgcggcgttacgccgtggttgatcattctttccaactcgtccccagagtcgttgctcgtttggcccgtcgcggagtgcattgcgacgaccaaaacaagccgaggctttcgtcgcaatgcactccgcgacgggccctggtgaacgcctctggtccgcagatcgaagttagacgttgcctctcct

SEQ ID NO: 18836 - RNA, 216 nt, unidentified
  source 1..216: mol_type = other RNA; note = Related to QWPK01000237.1; note = Planctomycetes bacterium
tgggagagagcagcgttctaagaccatcttgctgcggcgttacgccgtggttgattattcttcccaactcgtccccagagtcgttgttcgtttggccagctcacctagtgggctgttcgaccaagacaagcacaaggctttcgctcagcccactaggtgagctggccttggtgaacgcctctggtccgcagatcgaagttagacgttgcctctccc

SEQ ID NO: 18837 - RNA, 214 nt, unidentified
  source 1..214: mol_type = other RNA; note = Related to JACPHK010000356.1; note = Planctomycetia bacterium
cgagggagtgcaacgttctaagactttctctgcggcgttccgccgtggttgagttttctttgcatttcttccccaaggccgttgttcgtttggccggtgacgtcccgtagggcgtcgcccaaatcaagccaaaccttgcaacaccctacgggacgtcaccggccttggtgaacgaccttggtccgaggactgaagttagcacgttgcctccctt

SEQ ID NO: 18838 - RNA, 128 nt, unidentified
  source 1..128: mol_type = other RNA; note = Related to JAGQPR010000143.1; note = Planctomycetales bacterium
gtttgccggtagacgctaccgtgtcaccggccatggcgagctgtgctcaacggtgacacggtagcgtctaccggcttgagtgaacgaccttggtccgttgctgcgaagttagtagattggccaccccg

SEQ ID NO: 18839 - RNA, 215 nt, unidentified
  source 1..215: mol_type = other RNA; note = Related to SIHJ01000002.1; note = Posidoniimonas corsicana
ggggcgcgaccggctttccaagacttttctgcggcgatacgccgcgggtgagattggtaaccattgcttccccaaggccgttgttcgttagccggcaacgttaccccgtgcgccggccaagacgagccacagctcaccggcgaacggggtaacgttgccggcctgagtgaacgaccttggtccgcagccgtgaagttgggaagccggccgccccg

SEQ ID NO: 18840 - RNA, 219 nt, unidentified
  source 1..219: mol_type = other RNA; note = Related to PZKM01000007.1; note = Blastopirellula marina
cgggagcgaggtgacgattcaagactaccttgctgcggcgatccgccgtggtcgagttttgcatctcattcttccccaaggtcgttgttcgtttggccattaccgacaggtagtgcgtcgaccaggacaagccgaggctttcgacacactacctgtcggtaatggccttggtgaacgacctcggtccgcggacgtgaagttgaatcgtcacccgctccg

SEQ ID NO: 18841 - RNA, 219 nt, unidentified
  source 1..219: mol_type = other RNA; note = Related to NZ_CP083740.1; note = Bremerella volcania
cgggagcgaggtgacgattcaagactaccttgctgcggcgatccgccgcggtcgagttttgcttcccattcttccccaaggtcgttgttcgtttggccaccactaccaggtagtgcgtcaaccaggacaagccgaggcttttgacacactacctggtagtggtggccttggtgaacgacctcggtccgcagacgtgaagttgtttcgtcacccgctccg

SEQ ID NO: 18842 - RNA, 219 nt, unidentified
  source 1..219: mol_type = other RNA; note = Related to QPEV01000010.1; note = Blastopirellula cremea
cgggagcgaggtgacgactcaagactaccttgctgcggcgatccgccgtggtcgagttttgcctctcattcttccccaaggtcgttgttcggttggccactaacgacatctagtgcgtcgaccaggacaagccgaggctttcgacgcactagatgtcgttagtggccttggtgaacgacctcggtccgcggacgtgaagttgaatcgtcacccgctccg

SEQ ID NO: 18843 - RNA, 219 nt, unidentified
  source 1..219: mol_type = other RNA; note = Related to NZ_CP037423.1; note = Stieleria neptunia
ttcgagcgtggtgacgattcaagcctaccttgctgcggcgatccgccgtggctgagttttgcttctcattcgtccccaaggtcgttgttcgtttggccgacggggctacccgttccgtcgaccaaggcaagccaaggctttcgacgtaacgggtagccccgtcggccttggtgaacgacctcggtccgcagacgtgaagttgaatcgtcacccgctcgg

SEQ ID NO: 18844 - RNA, 219 nt, unidentified
  source 1..219: mol_type = other RNA; note = Related to NZ_ANOF01000123.1; note = Rhodopirellula sp.
ttagagcgaggcgacgattcaagcctaccttgctgcggcgatccgccgtggttgagttttgcttctcattcgtccccaaggtcgttgttcgtttggccaccaccgcatggtagtgcgtcgaccaggacaagccaaggctttcgacgcactaccatgcggtggtggccttggtgaacgacctcggtccgcagacgtgaagttgaatcgtcgcccgctctg

SEQ ID NO: 18845 - RNA, 204 nt, unidentified
  source 1..204: mol_type = other RNA; note = Related to JACKHI010000001.1; note = Phycisphaerales bacterium
aggccgatcacctgagactttttctgcggcgttccgccgtggttgagattggctttgcatgcatccccaaggccgttgttcgtatggcccaacgcacaccccgtgcggttggccatgacaagccgaggcttcctaccgcacggggtgtgcgttgggccttggttaacgacctcggtccggagatctgaagtcaggtgatcggcc

SEQ ID NO: 18846 - RNA, 222 nt, unidentified
  source 1..222: mol_type = other RNA; note = Related to JACMKE010000965.1; note = Burkholderiales bacterium
gagtggcgggccggccttgaccgagaccatccatactgcggcgttccgccgcggttgcgtctgcccagccatgcttccccacgaccgttgttcgtttgggcccacccgctaccgtgcgctgcggccaagacgacccaagggtcccgccgcgcacggtagcgggtgggcccttggttaacggccgcggtcctgagcgagtagtcggcaagacgacccgccact

SEQ ID NO: 18847 - RNA, 221 nt, unidentified
  source 1..221: mol_type = other RNA; note = Related to JADJTK010000010.1; note = Opitutaceae bacterium
gagtggcgggccggcgcttgctgagaccaccatgctgcggcgttccgccgcggttgcgtttgcctagccatgcttccccacgaccgttgttcgtttggcaccgcaggccactatgcgccgcggccaaaacgacccaagggtcccgcggcgcatagtggcctgcggtgccttggttaacggccgcggtcctaagcgagtagtcaacaagaccgcccgccact

SEQ ID NO: 18848 - RNA, 221 nt, unidentified
  source 1..221: mol_type = other RNA; note = Related to SLWZ01000015.1; note = Proposed Chthoniobacter flavus
gagtggcgggctggtcttcactgagaccaccatgctgcggcgttccgccgcggttgcgtttgcccagccatgcttccccaaggccgttgttcgtttggcaccgcccgctaccgtcgcgggcggccaagacaacccaagggttccgcccacgacggtagcgggcggtgccttggttaacggtctcggtcctgagcgagtagtcagtgagaccacccgccact

SEQ ID NO: 18849 - RNA, 208 nt, unidentified
  source 1..208: mol_type = other RNA; note = Related to JADLHC010000305.1; note = Planctomycetia bacterium
aggaagcggacgtctgagacaggttctgctgcggtgtttcgccgtggctgcccatgcccgtccatgcgtccccagggtcgttgttcgtgttggccggtgcgggtcctgtgcactggccatcacaagccgaggcttgcccgtgcacaggacccgcaccggccttggtgaacgaccccggtccgaaggttgaagtcagccgtccgcttcc

SEQ ID NO: 18850 - RNA, 214 nt, unidentified
  source 1..214: mol_type = other RNA; note = Related to JAIPJY010000032.1; note = Prosthecobacter sp.
gaggggacgcatgctcactgagaccatccttgcggtgttccgccgcgaatgaagctgcccgtccatgcatccccaagcccgttgttcggatggccactgtcgccacccgacgcttggccaaggcaacccgaacgttcgcacgcgtcgggtggcgacagtggcctgagtgaacggacttggtcctgagcaagtagtcagtgacgcatgcgcccct

SEQ ID NO: 18851 - RNA, 213 nt, unidentified
  source 1..213: mol_type = other RNA; note = Related to JADJPW010000004.1; note = Verrucomicrobiaceae bacterium
gaggggacgcatgctcactgagaccatccttgcggtgttccgccgcgaatgaagttgcccgtccatgcatccccaagcccgttgttcgggtggcaatcgcgtcacccagcacttggccaaggcaacccaaacgttctcacgtgcgtggtatgcgcaattgcctgagtgaacggacttggtcctgagcaagtagtcagtgacgcatgcgcccct

SEQ ID NO: 18852 - RNA, 206 nt, unidentified
  source 1..206: mol_type = other RNA; note = Related to NZ_JAALXT010000006.1; note = Rubinisphaera sp.
cggtcggtcggctgagaccaattgactgtggcgatccgccgcggttgcgttagcctacccattgccttcccagggccgttgttcgtgtggccagccccatcattggcggcggggccacagcaagccacaggctttccccgccgccaatgatggggctggcctgagtgaacgaccctggtccgccgtgagaagtcagccgaccggct

SEQ ID NO: 18853 - RNA, 202 nt, unidentified
  source 1..202: mol_type = other RNA; note = Related to NZ_JACHXU010000001.1; note = Rhodopirellula rubra
tcgttccgacgacgcgaagacctgaattgctgcggtgttccgccgtggttgaaattcgagaagcattcgcttcctcgaatcgccggtattgtcccctctccatcggtgagatgggacaatatcacgtacgtgaccatctcaccgatggagaggggacccgacgaatcgggcctcagacgcgaagttggcttcagtcggttca

SEQ ID NO: 18854 - RNA, 216 nt, unidentified
  source 1..216: mol_type = other RNA; note = Related to CP043547.1; note = Planctomycetales bacterium 10988
caggcgaagagagatagaactaagacgatttgctgcggcgttccgccgtggtcgctcatgactttccatgcttccccaaagccgttgttcgtgatccgacaccccgtctagagggagtggaccgacacgagccaaggctctccggatccctctagacggggtgtcggtgagtgaacgactttggtcctttgctagaagttagttccctcttcgctt

SEQ ID NO: 18855 - RNA, 226 nt, unidentified
  source 1..226: mol_type = other RNA; note = Related to JADLAG010000600.1; note = Polyangiaceae bacterium
gcaaggaggtccgcccgctcgagcccaacatgctgcggcgctccgccgcggtggaggttgttcttccatgcatccccacccccgatgttctttttggcgcctttgccaccggtgtcgttccactcagcggaaccagacaagtctggatctggaacgacaccggtggccggcgccttggtgatcgggtgtggtcacgagcaagtagtcgggcgggcgggcctccttg

SEQ ID NO: 18856 - RNA, 219 nt, unidentified; identical to SEQ ID NO: 18798
  source 1..219: mol_type = other RNA; note = Related to NC_010162.1; note = Sorangium cellulosum

SEQ ID NO: 18857 - RNA, 224 nt, unidentified
  source 1..224: mol_type = other RNA; note = Related to NZ_ASRX01000016.1; note = Chondromyces apiculatus
gcaaggaggtccacccgctcgagcccaacatgctgcggcgttccgccgcggtggcgttcgttctcccatgcattcccacccccgatgtgcgtctgggcgccttaggcctcgacgacaagacccagggagttgcctgacggcggaacctctcgtcgtcgaggccacggcgccctgggtgatcgggtgtggtcaggagcgagtcgtcgggcgggtgggcctccttg

SEQ ID NO: 18858 - RNA, 218 nt, unidentified
  source 1..218: mol_type = other RNA; note = Related to NZ_SSMQ01000028.1; note = Polyangium fumosum
gcaaggaggtccgtccgcccgagcccaccatgctgcggcgttccgccgtggcggagttcgttcccccatgcgtccccgcgcccgatgttcttttggccctaaagccccctaccagcatccactcagcggacccttgggtctggatgccggtagggggcctagggcctcggtgatcggacgtggtcctaggcgagtagtcgggcggacgggcttccttg

SEQ ID NO: 18859 - RNA, 218 nt, unidentified
  source 1..218: mol_type = other RNA; note = Related to JADJXL010000001.1; note = Polyangiaceae bacterium
gcaaggaggtcgttgcactcgagcccatcatgctgcggcgttccgccgtggcggagttcgttcccacatgcgtccccaccctcgatgttctttgggtaccccatgccctaggctgcgttcactcagcagacccgagggtctgaacgctgcctagggcacgggtacctgcgtgatcgagtgcggtcctaggagagatgtcgggtgcaacggcttccttg

SEQ ID NO: 18860 - RNA, 218 nt, unidentified
  source 1..218: mol_type = other RNA; note = Related to NZ_CP079217.1; note = Polyangium sp.
gcaaggaggtccgtccgctcgagcccaccatgctgcggcgttccgccgtggcggagtccgttcccccatgcgtccccacccccgatattctttgggcgcctatggtacccctccgcacccactcaagcgacccgagggtccgggtgccgaggggtacccaggcgccttggtgatcgggtgtggtccagagcgagtagtcgggtggacgggcctccttg

SEQ ID NO: 18861 - RNA, 219 nt, unidentified
  source 1..219: mol_type = other RNA; note = Related to JABBJJ010000008.1; note = Pyxidicoccus fallax
aaggagttcccttccgctcgagcccttcatgccacggtgttccgccgcggcggtggtctctctctcattcgtccccacgcccgatgttctttttgggaatcaggggcaccggcggcctgtaccagccggaccctgcgggtctcggccagccggtgcccccgattcccctcgtgatcggccgtggtccagcgtctgaagtcgggttggaagggaactcct

SEQ ID NO: 18862 - RNA, 218 nt, unidentified
  source 1..218: mol_type = other RNA; note = Related to JACPVI010000075.1; note = Myxococcales bacterium
aggaggccccgctcgcccgagcccttcagtgccgcggtgttccgccgcggcggaagtccgtctctcattcgtacccacgcccgatgctctttttggaattcacgggggtgtgacggcctgaactaatccgacccttcgggtctgggccgcacacccccgcgaattcctcggtgatcggacgtggtcaggggttcgaagtcgggcgagctggggcctcc

SEQ ID NO: 18863 - RNA, 219 nt, unidentified
  source 1..219: mol_type = other RNA; note = Related to JAIBBR010000058.1; note = Myxococcaceae bacterium
aaggaggaacctgacgaacgagtccgctatgccacggtgttccgccgtggcggcagtctgattcaccattacgtcccgacacccgatgttctttgacggaatgcaggcactacgacgctgtgtactgaatcggcccaagggcctgcagcgcgtagtgcccgcattcctccggtgatcggtcgtcgtcatagggaagaagtcgctcgtcagggtcctcct

SEQ ID NO: 18864 - RNA, 221 nt, unidentified; identical to SEQ ID NO: 18753
  source 1..221: mol_type = other RNA; note = Related to CP016211.1; note = Minicystis rosea

SEQ ID NO: 18865 - RNA, 225 nt, unidentified
  source 1..225: mol_type = other RNA; note = Related to JADJRH010000011.1; note = Polyangiaceae bacterium
tcaaggagcttcgatcccccgagtccatccagccgcgatgttccgtcgcggcggccgttcgtctaccatgcgtaccctcgcccgatattctttttggcacccagaccacctctcgtacgtgcactcaggggagacgccgagtcgtctctccgtacgagaggtggtcgggtgccttcgtgatcgggcgtggtcctcgggaagtcgtcgggggatcgaagttccttc

SEQ ID NO: 18866 - RNA, 217 nt, unidentified
  source 1..217: mol_type = other RNA; note = Related to JAFEBD010000111.1; note = Deltaproteobacteria bacterium
gcaaggaggcccgagcgcacgagcccatcatgctgcggcgttccgccgtggcggctgttgctgtctcatgcttccccacgcccgatgttcttttgggctcgccgcgtgctgtctcgctccaccagagcgacagatgtctgtatcgacgacagcacgcgcgagcccttggtgatcggacgcggtcctacgcacgaagtcgagcactcgggcttccttc

SEQ ID NO: 18867 - RNA, 217 nt, unidentified
  source 1..217: mol_type = other RNA; note = Related to NZ_CP012333.1; note = Labilithrix luteola
gcaaggaagtccgagcgcacgagaccatcatgctgcggcgttccgccgtggcggccgttgcttctccatgcttccccacgcccgatgttcttttgggctcgcagggtgccgtgtcgtttcaccagggcaacagatgtttgctccaaacacggcaccccggagcccttcgtgatcggacgcggtcctacgcacgaagtcgagctctcgggcttccttc

SEQ ID NO: 18868 - RNA, 218 nt, unidentified
  source 1..218: mol_type = other RNA; note = Related to JACRCQ010000074.1; note = Deltaproteobacteria bacterium
aaggaggtccgatcgcacgagcccgtcatgctgcggcgttacgccgtggcggagtctgctctaccatgcatccccacgcccgatattcttttgggcccaggggtgcccacacaccatcctgagtcgacatcaagagtcgctggttgtgtgggcacgccccgggccctcggtgatcggacgcggtccttcgcacgaagtcgagcgcaatcgggcctcct

SEQ ID NO: 18869 - RNA, 221 nt, unidentified
  source 1..221: mol_type = other RNA; note = Related to JADZES010000060.1; note = Deltaproteobacteria bacterium
ccgaggaggaccgagctctccgagcccatgatgctgcggcgctccgccgtggcggacattgctgatcattgcttccccacacccgatgttcttttgggcgccttttgccactacagtgctgcaccaaggcaactccgcggagtttccagcaccgtagtggctcggcgcctgggtgatcgggcgtggtccctagcgagaagtcggtggctcggtcttcctcg

SEQ ID NO: 18870 - RNA, 223 nt, unidentified
  source 1..223: mol_type = other RNA; note = Related to JAEUKI010000057.1; note = Myxococcales bacterium
ccaggaggtcgcgaacacccgagcccacaattcccggtgatccgccggggtgagagaaagctctttcatgcgtcccaacgctcgctgctcttttgcgcgcccatcacccatggtgggacccgccagggcaacgctgcgcgttcggctcccaccatgggtgcgggcgcgctttggttagcgatcgttgtcaggagctggaatgtcgggtgttcgcggcctcctg

SEQ ID NO: 18871 - RNA, 241 nt, unidentified; identical to SEQ ID NO: 18724
  source 1..241: mol_type = other RNA; note = Related to NZ_CP011125.1; note = Sandaracinus amylolyticus

SEQ ID NO: 18872 - RNA, 227 nt, unidentified
  source 1..227: mol_type = other RNA; note = Related to JAFLCL010000034.1; note = Deltaproteobacteria bacterium
cgagtgagaggtgaaggcacgagccctcatgctgcggcgttacgccgtggtcgacgttggccttccattgctcacccacgcccgttgttcttttcggtacctgcactagctgtcgttggcaccgaggagagcggcgcgagcggcgctctgccaagcgacagctagtgcaggtaccgtcgtgaacggacgtggtccaggggtagaagtcgagctttcacctctctctc

SEQ ID NO: 18873 - RNA, 227 nt, unidentified
  source 1..227: mol_type = other RNA; note = Related to JAIBCE010000038.1; note = Sandaracinaceae bacterium
ggagtgagaggagcgaggcacgagccctcatgctgcggcgttacgccgtggtcgacgttggccttccattgctcacccacgcccgttgttcttttcggcgcccgcgctagctgtcgttggcaccgaggagagcccgcgagcggagccctgccaagcgacagctagcgcgggcgccgtcgtgaacggccgtggtccagggatagaagtcgagcttcctcctctctctt

SEQ ID NO: 18874 - RNA, 221 nt, unidentified
  source 1..221: mol_type = other RNA; note = Related to JADLFP010000335.1; note = Acidobacteria bacterium
ggagggaggccccgttccccgagaccatccatcctgcggtgttccgccgcgggcgcccgggctctcccatgcttccccacacccgatgttcttctgggctccggcagcctctgccggactccactgaggcaacccgagggtttgaggtccggcagaggctgccggagcctcggtgatcgggcgtggtccgccgtgagaagtcggggatcggggtttccttc

SEQ ID NO: 18875 - RNA, 235 nt, unidentified
  source 1..235: mol_type = other RNA; note = Related to PABA01000104.1; note = Sandaracinus sp.
tcgaggaggtctgcgagcacgagcccatcatgctgcggcgctacgccgtggcggagcttcgctacccacccgaccccgcgcccgatgctctgggttggcgccgccgacggcatgcgcctgtcccaagggcaacgcggtaggctgcgcctaccacgtcgacaggcgcatgccgtcgcggcgccgtgggtgatcggacgcggtcccgagcacgaagtcgagctggcagacctcctcg

SEQ ID NO: 18876 - RNA, 229 nt, unidentified
  source 1..229: mol_type = other RNA; note = Related to JADZAM010000038.1; note = Sandaracinaceae bacterium
cgagggagagcctcacgcacgagcccacatgccgcggtgctccgccgcggtggagattgctctcccatgctttcccacgcccgatgttcttggtgggcgccacgcgtgcctaccgcgaacaccaagggcgacccccgcgatgcgggagtccgttcgccgtaggcacgcgtggcgccctcggtgatcggacgtggtcctcggtgagaagtcgagcgtggggctctccctc

SEQ ID NO: 18877 - RNA, 224 nt, unidentified
  source 1..224: mol_type = other RNA; note = Related to SHBB01000309.1; note = Sandaracinaceae bacterium
ggagagactctcgggaggaccgagcccaacatgccgcggcgttccgccgtggtggaggtttgccttccattcactcccacgcccgatgttctgttgggggcacaggtcccctgcagcgctcacgaagggcgactcgggagagtctgagcgccgcaggggacccgtgccccctgggtgatcggacgtggtcctcggaccgagagtcgatctctcgagagtctctc

SEQ ID NO: 18878 - RNA, 217 nt, unidentified
  source 1..217: mol_type = other RNA; note = Related to JACKEC010000023.1; note = Sandaracinaceae bacterium
acgtaccgagacgagaccgagctcatcatgccgcggcgttacgccgcggtggaggttgcccttccatgctctcccacgtccgatgttcgtttggggctgccgtgccccgtgcgcgaacacgagagacgaatcgggagattctgttcgcgcacggggcacgcagccccttggtgatcgaacgtggtccacggacagaagtcgatctccgatgggtacg

SEQ ID NO: 18879 - RNA, 222 nt, unidentified
  source 1..222: mol_type = other RNA; note = Related to JADJGV010000002.1; note = Myxococcales bacterium
gcaaggagatccgcgcgcacgagcccactatgctgcggcgttccgccgtggcgggacttgctccaccattgctcacccacgcccgattttcttttgggccctatgcggtgctagcgctcctcactgagacgaccacgagagtcttgggagccgctagcaccgccgggccctcggtgatcggtcgcggtcctgcgcacgaagtcgagcgagcggatctccttg

SEQ ID NO: 18880 - RNA, 219 nt, unidentified
  source 1..219: mol_type = other RNA; note = Related to JABFYI010000076.1; note = Polyangiaceae bacterium
ccaaggagccacgctcccccgagcccatcatgctgcggcgctccgccgcggtggctgtttctccgcattgcatcccgacgcccgattttcgtggggccgccatcacaggtaggacatgtcacgcagacaacccgagggtttgtcatctcctacctgtgcggctggccttggtgatcggacgtcgtcgtaagtgagtcgtcgagggagcgtggttccttg

SEQ ID NO: 18881 - RNA, 220 nt, unidentified
  source 1..220: mol_type = other RNA; note = Related to JABFXY010000131.1; note = Polyangiaceae bacterium
ccaaggagcctcgctcccccgagcccatcatgctgcggcgctccgccgcggtggccgtatctctgctttgcatcccgacgcccgatgttctgggggccgccaagtcctgcagtcgcgttcacgaaggcaaccacgagggtttgcacgtgactgcaggaccggctggccttggtgatcggacgtcgtcgtcagtgagtcgtcgagggagcgaggttccttg

SEQ ID NO: 18882 - RNA, 215 nt, unidentified
  source 1..215: mol_type = other RNA; note = Related to JAEUKE010000177.1; note = Myxococcales bacterium
caggagcctcgctcccccgagcccatcatgctgcggcgctacgccgcggtggctgtttctctgcattgcatcccgacgcccgattttcgtggggccgccatgtcctaccgtagcgttcacgaaggcaaccccagggtttgctcgccacggtaggaccggctggccttggtgatcggacgtcgtcgtcagtgagtcgtcgagggagcgaggttcct

SEQ ID NO: 18883 - RNA, 215 nt, unidentified
  source 1..215: mol_type = other RNA; note = Related to JACQYO010000047.1; note = Deltaproteobacteria bacterium
tcgaggagaccgggtcgcacgagcccactatgccgcggcgttccgccgcggtggagcttgctatctcgtgctttcccacgcccgttgttcttgggcgccggatcgacaccgtcgtccgcatactcagtcgacgtatctcgctcgacgacggtgtcgatccggctcggtgaacggacgtggtccttcgtatgaagtcgggcgacccggcctcctcg

SEQ ID NO: 18884 - RNA, 215 nt, unidentified
  source 1..215: mol_type = other RNA; note = Related to JACPFK010000116.1; note = Deltaproteobacteria bacterium
tcgaggaggtcgggccgcacgagcccaccatgccgcggtgttccgccgcggtggagattgctacctcgtgctttcccacgcccgttgttcttgggcgccggatcgacatccacgtccgcatactcagtcgacgtatctcgctcgacgtggatgtcgatccggctcggtgaacggacgtggtccctcggttgaagtcgggcgtcccgacctcctcg

SEQ ID NO: 18885 - RNA, 213 nt, unidentified
  source 1..213: mol_type = other RNA; note = Related to JADJBV010000001.1; note = Deltaproteobacteria bacterium
aggagaggatccggacgttcgagtccatgatgccgcggtgttccgccgcgacggagtttgcctgccattgcttccccacgcccgttgttcttttgcgggacgcactgcctgtcttcctgactcattcgacgggtctcgtaatgacaggcagtgcgtcccgctcggtgaacggacgtggtcctcggaaagaagtcgggcgtccggatcctctcc

SEQ ID NO: 18886 - RNA, 220 nt, unidentified
  source 1..220: mol_type = other RNA; note = Related to JACKED010000002.1; note = Sandaracinus sp.
aggaggagattcaccgaaccgagcccaccatgccgcggtgttccgccgcggtggcgattggtcttccatgcttccccacgcccgatgctcttgggtggcgccgacacacagcgccaccggacaccagagcgacccaagggtctgccgcccgcgctgtgtgcggcgccatgggtgatcggacgcggtccttcgcgagaagtcggttcggtgagtctcctct

SEQ ID NO: 18887 - RNA, 150 nt, unidentified
  source 1..150: mol_type = other RNA; note = Related to NZ_JAHXBF010000024.1; note = Hyalangium sp.
agggggacctggcctcgcagacgagccgtttgtgccgcggtgtttcgccgcggcggcatcttgtccccatcacatcgccgcgggcccagcgtacggaacgcagggctccacgagtccagggcctcgcaagtcgtccagtcccggtcccct

SEQ ID NO: 18888 - RNA, 150 nt, unidentified
  source 1..150: mol_type = other RNA; note = Related to NZ_JMCB01000011.1; note = Hyalangium minutum
agggggtccgggcctcgcagacgagccgttcgtgccgcggtgtttcgccgcggcggcttcttgtccccatcacatcgccacggtcccagcgtacgcaacgctgggatccccgagtccagggcctcgcaagtcgtccccgcccggtcccct

SEQ ID NO: 18889 - RNA, 148 nt, unidentified
  source 1..148: mol_type = other RNA; note = Related to JAEUJQ010000080.1; note = Myxococcaceae bacterium
gtggggacggtgggtgcagccgagccagttgaaccacggtgcttcgccgtggtggcgccttgccttcatcaccacgccagggtccccacgtacgcaacgcggggagcccagggtccagagcctcgcaggtcgacccctgccggcctca

SEQ ID NO: 18890 - RNA, 146 nt, unidentified
  source 1..146: mol_type = other RNA; note = Related to QFQP01000022.1; note = Archangium gephyra
ttggggagacaggcgcagccgagccagttgaaccacggtgtttcgccgtggtggtgccttgtttccatcacttcgccagggtccccacgtacgcaacgcggggagccccgggtccacagcttcgcaggtcgactcctgtcgcctca

SEQ ID NO: 18891 - RNA, 148 nt, unidentified
  source 1..148: mol_type = other RNA; note = Related to MWCO01000010.1; note = Deltaproteobacteria bacterium ADurb.Bin207
tctcggaagcgctttgcagaaccagcctctcatgctgcggtgtttcgccgcagtggaatgttgcctcctttccaccgccacggtccccacgtgcgtaacgtggggagccatggtgccagagcctcgaagtggttcaggcgattccggg

SEQ ID NO: 18892 - RNA, 221 nt, unidentified
  source 1..221: mol_type = other RNA; note = Related to NZ_CP011509.1; note = Archangium gephyra
cggcggtcagggggcagtaccttgcaatccggacggtgtttcgccgtccatgcttcctggcctgtcatgcatcactggcccgctcttcactgtgcggtacctccctcctggtgacggcagcgctgtcgaccgcgtcggtcctgcgcgtcaccaggagggggtaccgcttgagttgagacggtccagtcccgagagcagtacgaaggagctctctgaccgcc

SEQ ID NO: 18893 - RNA, 152 nt, unidentified
  source 1..152: mol_type = other RNA; note = Related to JAFLEF010000003.1; note = Verrucomicrobia bacterium
ataagatccggcggacagagattagccatccatgccacggtgtttcgccgtggtggaccactgcccgacatacttcgccagggttcccaacgttcgcaacgctgggaggccctgagtccagagcctcggaagtaatccgccgccgggtctta

SEQ ID NO: 18894 - RNA, 152 nt, unidentified
  source 1..152: mol_type = other RNA; note = Related to WRPG01000015.1; note = Verrucomicrobia subdivision 3 bacterium
ataaggcccggcggacatgggttagccatcattgccgcggtgtttcgccgcggtggaaacttggtagccatacatcgccagggttccctacgttcgcaacgcagggaggccctgagtccagagcctcggaagtaatccgccgccgggccttg

SEQ ID NO: 18895 - RNA, 152 nt, unidentified
  source 1..152: mol_type = other RNA; note = Related to JAFEGM010000010.1; note = Verrucomicrobia bacterium
agcaggcccggcggactcggattagccaccattgccgcggtgtttcgccgcggtggaaatctgtctgcatgtcatcgccaaggctcccagcgtgcgcaacgccgggaggccctgagtccagagcctcggaagtgatccaccgccgggcctgc

SEQ ID NO: 18896 - RNA, 152 nt, unidentified
  source 1..152: mol_type = other RNA; note = Related to JACSRI010000083.1; note = Opitutaceae bacterium
acaaggtccgccggttcacggccagccatccatgccacggtgtttcgccgtggcggttcgttgtctccattactccgccagggctcccaacgttcgaaacgctgggaggcccagagtccagagcctcgcaagtgaccggccggcggaccttg

SEQ ID NO: 18897 - RNA, 150 nt, unidentified
  source 1..150: mol_type = other RNA; note = Related to NZ_CP036275.1; note = Maioricimonas rarisocia
cagcagatccgatcgtgcaaccagccttcatgccgtggtgtttcgccgcggcggcgcattccgctcatcacatcgccacgggttcccacgtacggaacgtgggagcccatgagtccagagccttgcaagtggttttccgccggaccggtt

SEQ ID NO: 18898 - RNA, 149 nt, unidentified
  source 1..149: mol_type = other RNA; note = Related to DTTU01000358.1; note = Phycisphaerales bacterium
tccgagcccgagagatgcaaccagccgcctatgctccggtgtttcgccggagtggagtccttgactcatcacatcgccacggttcccagcgtacgaaacgcgggaggccgcgagtccatagccttgcaagtggagcctctcgggctcgg

SEQ ID NO: 18899 - RNA, 152 nt, unidentified
  source 1..152: mol_type = other RNA; note = Related to JAGOBA010000003.1; note = Alphaproteobacteria bacterium
cccggatcggggcaggttgctccagcttccaacgccacggtgtttcgccgtggttgcttcctgatcccattacatcgccacggttccccacgtacgaaacgtggggaggccacgggtccagagccttgtgggtggtgcaccgcccgatccgg

SEQ ID NO: 18900 - RNA, 152 nt, unidentified
  source 1..152: mol_type = other RNA; note = Related to JABFRX010000136.1; note = Alphaproteobacteria bacterium
cccggatcgaggctggccgttccagcttccaacgccacggtgtttcgccgcggttgccttttgatcccattacatcgccacggctcccatcgtacgaaacgacgggataccacgggtccagagcttagtgggtggatggcggccttgtccgg

SEQ ID NO: 18901 - RNA, 151 nt, unidentified
  source 1..151: mol_type = other RNA; note = Related to JAFMSC010000026.1; note = Hyphomicrobiaceae bacterium
cccgggtctggcagggccttccagcttcctttgccacggcgttccgccgtggtggcctgctactcccatcacatcgccacggctccccacgtacgaaacgaggggaaaccacgggtccaaagccttgttggtggttggccggccggcccgg

SEQ ID NO: 18902 - RNA, 152 nt, unidentified
  source 1..152: mol_type = other RNA; note = Related to JAFECH010000062.1; note = Proteobacteria bacterium
cccggacctgataggatcatccagctttccatgccacggtgtttcgccgcggtggctacctgatcccatcacatcgccacggttccccacgtacgaaacgcggggaggccacgggtccaaagccttgtttgtgggtgttccttcagattcgg

SEQ ID NO: 18903 - RNA, 150 nt, unidentified
  source 1..150: mol_type = other RNA; note = Related to JAFMSG010000097.1; note = Bradyrhizobiaceae bacterium
gcggggcggtacttcaatatccagcaattaacgccacggtgcttcgccgtggttgcgtgttatctccttcacttcgccaaggtccccgacgtacgaaacgcggggagccctgagtccagagcctcgttagtggttaggagtgccgccccg

SEQ ID NO: 18904 - RNA, 152 nt, unidentified
  source 1..152: mol_type = other RNA; note = Related to JAAZAJ010000036.1; note = Planctomycetes bacterium
gccgggcccggcggcctgcaaccagccgatgataccgcggtgtttcgccgcggtggcaaagtgagccgttcacgccgccacggctcccagcgtacgcaacgccgggaggccacgagtccagagcctcgcaagtggttccgcgtcgggctcgg

SEQ ID NO: 18905 - RNA, 150 nt, unidentified
  source 1..150: mol_type = other RNA; note = Related to QQVE01000048.1; note = Planctomycetes bacterium
tccgggcccggcgaactgcaaccagccgttcgtgccgcggtgcttcgccgcggtggcactctgcatgtattacgccgccacggctcccacgtacgaaacgcgggaggccatgagtccagcgccttgcaagtggttcggcgccgggctcgg

SEQ ID NO: 18906 - RNA, 152 nt, unidentified
  source 1..152: mol_type = other RNA; note = Related to JAGQOZ010000372.1; note = Planctomycetales bacterium
gttcgaacccggtggcttgcaaccagccaacgatactgcggtgcttcgccgcggtggcttgctgcgtgtattacgccgccacggctcccacgtacgcaacgtgggaggccacgagtccaaagccttgcaagtggtgcactgccgggttcgaa

SEQ ID NO: 18907 - RNA, 148 nt, unidentified
  source 1..148: mol_type = other RNA; note = Related to WGNR01000010.1; note = unidentified bacterium
cgggcctggcgtgcgtgcaaccagccaacgatgccgcggtgtttcgccgcggtggcctgctgcgtccttaacgccgccacagatcccgtcgtacgaaacgatgggagccacgattccagagccttgcaagtggttcgccgccaggctc

SEQ ID NO: 18908 - RNA, 149 nt, unidentified
  source 1..149: mol_type = other RNA; note = Related to JAFGFF010000467.1; note = Pirellulales bacterium
ccgggcctggcgggctcgcaaccagccaactatgccgcggtgtttcgccgcggcggcatgctgcgtccataacgccgccacggctcccacgtacgcaacgtgggaggccacgagtccaaagcctcgcaagtggttccccaccaggcccg

SEQ ID NO: 18909 - RNA, 152 nt, unidentified
  source 1..152: mol_type = other RNA; note = Related to PSQY01000124.1; note = Proteobacteria bacterium
agagggcacgctggcgtgcaaccagccgggaatgccccggtgtttcgccggggcggcgctttgagcgcattacctcgccacggctccccacgccgcagacgcagggagaccatgagtccagagccttgcaagtggtcggctggcgtgtcctc

SEQ ID NO: 18910 - RNA, 149 nt, unidentified
  source 1..149: mol_type = other RNA; note = Related to CP036279.1; note = Planctomycetes bacterium Pan216
tccggcccttgggcagcgcaattagccgtgatcctacggtgtttcgccgtgggggagtattgggtctcttcacaacgccgcggatcccacgtacgtaacgtgggaagccacgagtccagagcctcgcaagtgattggttcgagggccgg

SEQ ID NO: 18911 - RNA, 129 nt, unidentified
  source 1..129: mol_type = other RNA; note = Related to JACQGK010000369.1; note = Armatimonadetes bacterium
tcgcccaggctagccatcctcccggtgtttcgccggggcggcaccctgtgcccactacatcgccaagctccccatcgcacgaaacgacggggaaagcccgagtccagagcctcgcaagtagcctgggcc

SEQ ID NO: 18912 - RNA, 152 nt, unidentified
  source 1..152: mol_type = other RNA; note = Related to QWHO01000540.1; note = bacterium CPR1
gggaaggctggctcgccagagttagccaacgattccacggtgtttcgccgtggaggcgcattgtcgccatcacgtcgccaaggtccccatcgtgccaaacaatggggagccctgagtccagggcctcgcaggtagcctcgggccagctttcc

SEQ ID NO: 18913 - RNA, 150 nt, unidentified
  source 1..150: mol_type = other RNA; note = Related to JADMJV010000021.1; note = unidentified bacterium
agagtggaatcggaaaatagttagccatctatgctgcggtgtttcgccgcagcggcacattgctgccataacaccgccaaggtccccatcgtacgcaacggcggggagccctgagtcctgggcctcgttagtaacttgcccattccaccc

SEQ ID NO: 18914 - RNA, 150 nt, unidentified
  source 1..150: mol_type = other RNA; note = Related to NZ_BLJN01000007.1; note = Steroidobacter agaridevorans
gcgtcgcccggcggcctgcagctagccatctgtccctggtgtttcgccagggcggcgccttgagcgcattacttcgccacggtccccacgtacgtaacgcggggagccatgagtccacggccttgcaggtagccttgccgccgggcaatt

SEQ ID NO: 18915 - RNA, 143 nt, unidentified
  source 1..143: mol_type = other RNA; note = Related to SADD01000012.1; note = Lujinxingia sediminis
agggtgagccacccggcgcgagccgaacatgccgcgtgcgtttcgccgcggcggcaccatcttccgatctcctcgccggttctcccacactgtggaagaagcgggcccagagcgtcgcaggtcgcctcgcaggtggctcaccc

SEQ ID NO: 18916 - RNA, 143 nt, unidentified
  source 1..143: mol_type = other RNA; note = Related to NZ_VOSM01000004.1; note = Lujinxingia vulgaris
agggtgagccaccgcgcgcgagccgaacatgccgcgtgcgattcgccgcggcggcaccatcttccgatctcctcgccggttctcccacactgtggaagaagcgggaccagagcgtcgcaggtcgcctcgctggtggctcaccc

SEQ ID NO: 18917 - RNA, 141 nt, unidentified
  source 1..141: mol_type = other RNA; note = Related to NZ_QHKO01000004.1; note = Lujinxingia litoralis
gagcggtcaccggtcgcgagccagcttcagccgcgtgcgtttcgccgcggcggcaccatcctccgatctcctcgccggttttcccacactgtgggaaaagcgggcccagagcgtcgcaggtcgccctggccggtgactcct

SEQ ID NO: 18918 - RNA, 149 nt, unidentified
  source 1..149: mol_type = other RNA; note = Related to QWHC01000005.1; note = Chloroflexi bacterium CFX4
tcgcacagcaagcgacgcggttagccaacatgctgcgatgtcccgtcgcggtggcaaactgtgcaggtcacttcttcacggctcccacagctcggacaagcgtgggaaccgctccatcacggagatcgtagccgcctgcttgctgtgtg

SEQ ID NO: 18919 - RNA, 136 nt, unidentified
  source 1..136: mol_type = other RNA; note = Related to JADYYJ010000076.1; note = Anaerolineae bacterium
tgaatgcgatgcggttagccattatgctgcgatgttacgtcgtggtgggatgctgaccagatcacgtcttcacaggtacccactctcgaacaagcgggtacctgctccaagatttgaaagtaaccgcatcgccctc

SEQ ID NO: 18920 - RNA, 154 nt, unidentified
  source 1..154: mol_type = other RNA; note = Related to NBMH01000138.1; note = Anaerolineaceae bacterium 4572_78
agggtagcttggttagccgattctgcgatggcacgtcgtggaggcgaattgttcaccacacttcttaatttaatcaccgagtgattaaattacttatgtcaaggttacgtgtaaccttgacataaggttcagtatgttagtaaccaagttaccc

SEQ ID NO: 18921 - RNA, 134 nt, unidentified
  source 1..134: mol_type = other RNA; note = Related to JACCSL010001044.1; note = Ardenticatenales bacterium
ggggtggcccggttagcccttcatactgcggcgttccgccgtggtggagttgtctagccaacccttctgctcaggttcctaccctacgaacaaggtaggagccgcttcaccgcttgttcgtaaccgggccatcc

SEQ ID NO: 18922 - RNA, 138 nt, unidentified
  source 1..138: mol_type = other RNA; note = Related to PSQZ01000251.1; note = Chloroflexi bacterium
cggcagcccggcatagccatttatgccgcggtgttacgccgtggtggagtactagcaccatcactccttcgccggtccacccagctttcgcacaagcgggtggaccgctccgggggctcgaacgtacgccgggctgtc

SEQ ID NO: 18923 - RNA, 221 nt, unidentified
  source 1..221: mol_type = other RNA; note = Related to NZ_CP069396.1; note = Archangium violaceum
cggcggtcagggggcagtaccttgcaacccggacggtgtttcgccgtccatgcctcatggcctgtcatgcatcactggcccgctctttactgtgcgcggcctccctccctgtcgccgcagcgatgtcgacctcgtcggtcctgcgcgcgacagggagggggccgcgcttgagttgagacggtccagtcccgagagcagtacgaaggtgctctctgaccgcc

SEQ ID NO: 18924 - RNA, 158 nt, unidentified
  source 1..158: mol_type = other RNA; note = Related to NZ_WJIE01000006.1; note = Polyangium spumosum
ggctcacgggaggcgcgagcagccagctatcaccccgcgatgtcacgtcgcggctgcgaacgactccccatggagaatgaagcgtcacggggaccgccccgcagggcttttcgtccccgtacgcctctgccgagcaggtggcgacgcctcccgtgagc

SEQ ID NO: 18925 - RNA, 218 nt, unidentified; identical to SEQ ID NO: 18860
  source 1..218: mol_type = other RNA; note = Related to NZ_CP079217.1; note = Polyangium sp.

SEQ ID NO: 18926 - RNA, 256 nt, unidentified; identical to SEQ ID NO: 18790
  source 1..256: mol_type = other RNA; note = Related to NC_020126.1; note = Myxococcus stipitatus

SEQ ID NO: 18927 - RNA, 148 nt, unidentified
  source 1..148: mol_type = other RNA; note = Related to JAACJQ010000343.1; note = Archangiaceae bacterium
ccggagtcgtgttcggctagccatctccgcgatgtcacgtcgcgggtgaacacgattcaccatgaagaatgaattggcgcgtgagtcgcctcgcggcttcttcactcatgctctcctctgcaggcaggtaacctcaagcgcgactccg

SEQ ID NO: 18928 - RNA, 153 nt, unidentified
  source 1..153: mol_type = other RNA; note = Related to JACCSS010001187.1; note = Deltaproteobacteria bacterium
tccccggagtgtggtcgagctagccttctgtcgatggtggtacgccatcgctgacaacgaccgaccatgaaacacgaagaggtgcgtggcttcgttgcctctccacacagccataccctcctctgccgagcgagtagacgccacgctccgggg

SEQ ID NO: 18929 - RNA, 152 nt, unidentified
  source 1..152: mol_type = other RNA; note = Related to JAEUKA010000036.1; note = Myxococcales bacterium
gttccttcgatcgctccgcagttagcttcctccgcgatgttacgtcgcggttgctttcgacctgcaatggacaatgcgctggtccgagctgccgcttgcggcttttctcagctcggtcaccgctgccacgcaagtagctgcgatcgaaggag

SEQ ID NO: 18930 - RNA, 154 nt, unidentified
  source 1..154: mol_type = other RNA; note = Related to JAEUKB010000029.1; note = Myxococcales bacterium
cgttccttcgatcgccacgcagttagcttcttccgcgatgctacgtcgcgggtgcgtacgacctacaatggacaatgcgctggaccgagctgccgcttgcggcttttctcagctcgggcaccgctgccacgcaagtagctgcgatcgaaggaac

SEQ ID NO: 18931 - RNA, 248 nt, unidentified
  source 1..248: mol_type = other RNA; note = Related to JABJWV010000001.1; note = Pseudenhygromyxa sp.
taggagccccgggatcatcagccgtgctcagcacagggcggcgccgcgccgtccgggcaaattctcccgacatgctccacaaggtaggctgttcgtgctttccctggccccgtagaggtcgtagacgacctcgtggctggggctaccacgcaaccgcggttcacgaggtcgtctacgacctctacggggccggaaagcggtgagcctaccgtgtcccaggtgggatcgtggcgacttcggtcgctcct

SEQ ID NO: 18932 - RNA, 213 nt, unidentified; identical to SEQ ID NO: 18749
  source 1..213: mol_type = other RNA; note = Related to NZ_JAGKQQ010000001.1; note = Gemmata sp.

SEQ ID NO: 18933 - RNA, 160 nt, unidentified
  source 1..160: mol_type = other RNA; note = Related to JAIOPV010000289.1; note = Planctomycetes bacterium
attcacggttcgcggttgaagttagcgaaaaccacggtgttacgccgtgggtggttttcagtgccgaccagttcagatcgggtctactccgagactcgcaccaggggcggtctcggagcagaccgtgccgcaggaggaaagtagccccgcgatccgtgag

SEQ ID NO: 18934 - RNA, 212 nt, unidentified
  source 1..212: mol_type = other RNA; note = Related to LR594584.1; note = Gemmataceae bacterium
acggtgtccgtcgcggtccgagaccaccatgctgcgatgttccgtcgcggttgaagttgctcgcgattgcgtcccccgagccgttggtcttttcgcccggtcagggctccctggactgggctgaatcgacctgcgtccccagtccagggagccctgaccgggcggcgtgaacgtctcgggtcccggatcgaagtcggccgcggcggacaccg

SEQ ID NO: 18935 - RNA, 155 nt, unidentified
  source 1..155: mol_type = other RNA; note = Related to JAIEMG010000136.1; note = Gemmataceae bacterium
agtttccgtccgcaccggaggtagcgacatctgcggcgttacgccgtgggaggtttgcagtgcccgccggtcaagacggtgtgcctgttccatacaggtatggaccaggcgcaccggtgcccataggaggtaagtagctcggtgcgggcggaaac

SEQ ID NO: 18936 - RNA, 150 nt, unidentified
  source 1..150: mol_type = other RNA; note = Related to JAEUIF010000053.1; note = Planctomycetia bacterium
gttccgcccgcgctggaggtagcgctgactgcggcgttacgccgcggatggacactacttgtgccaagcaagaacgtccacccgggcctctacagatagggcccgggcggacagggcctatcggaggtaagtagctcggcgcgggcggaa

SEQ ID NO: 18937 - RNA, 164 nt, unidentified
  source 1..164: mol_type = other RNA; note = Related to VGYW01000017.1; note = Planctomycetes bacterium
cggaagggcggggagagagctttagccgacacgcaagtgtcgctgcggcgttacgccgcggacgtgccctagctcgcttcacgccagcagaatattccagtggtcgttccgaccactgaaatattcggcgcaggagagcgacgtaaagccctccccgccccccg

SEQ ID NO: 18938 - RNA, 224 nt, unidentified
  source 1..224: mol_type = other RNA; note = Related to SOJX01000071.1; note = Planctomycetes bacterium
ccggcggggaccggccgaactttagctcgtgcgtaaccaatcgcaaccgcggcgttccgccgcggatggagtatcgcaacccttcgcttctacggatgtccgcaaggtcggaagaccttgcaagcaaggtcttccgaccttgcgacatccgtgcagctcgtggggttatttatcgaaaacaagttttcgataaataacccctggtaaagtaccggtccccgccg

SEQ ID NO: 18939 - RNA, 120 nt, unidentified
  source 1..120: mol_type = other RNA; note = Related to MVDA01000360.1; note = Desulfobacteraceae bacterium 4484_190.1
ctgatgccggagcctgaattttagcttttcgtatggtgttacgccatgcaagcctgtcaccttgcttcgcacagccgcgagctatctcccggctgttatagtaaatcggctccggcgtca

SEQ ID NO: 18940 - RNA, 157 nt, unidentified
  source 1..157: mol_type = other RNA; note = Related to MHBH01000069.1; note = Lentisphaerae bacterium GWF2_49_21
tgacggagcggcagtagatttttagatcgtgcgcggtgtttcgccgcgcttgcgttactacccggcttagtccaaggagattaaaaattctttttaatctccatggactataaatggctatgccatatggttgacaagtaaaaactgccgctccgtc

SEQ ID NO: 18941 - RNA, 159 nt, unidentified
  source 1..159: mol_type = other RNA; note = Related to JAFGPY010000175.1; note = Planctomycetes bacterium
ggccgaggcggccgatcggattagtcatggggcggcgtttcgccgtccaagccggttacatcttcactgccgtccgcggcgctccaccggttgaggctgatgctcaaccgccggcgccgcggggttcggatcggatagtaatcacgcggtcgcctcggc

SEQ ID NO: 18942 - RNA, 132 nt, unidentified
  source 1..132: mol_type = other RNA; note = Related to JAADGH010000108.1; note = Planctomycetes bacterium
aggtggcgggccgagagagttttagatttgtgcggcgattcgccgtgcgtgcgctttgcgccatcaaccagcctttgttcctgctgagagcaggaacgcagaatggatgcatagtaaaaccggtccgccacc

SEQ ID NO: 18943 - RNA, 150 nt, unidentified
  source 1..150: mol_type = other RNA; note = Related to JAFGGJ010000038.1; note = Planctomycetes bacterium
gcgacgggagggagacaggcttagaacgcgtgcggcgtttcgccgcgccggtgtacgcctttttccaacggctcgatcggagtcggaggataacgcgttatccaccgctccggagcataagcaggctcaggtaagtgctccctcccgccc

SEQ ID NO: 18944 - RNA, 171 nt, unidentified
  source 1..171: mol_type = other RNA; note = Related to JAGOOG010000002.1; note = Deltaproteobacteria bacterium
agaagggcagtcggtaaatgcttagatcgtcgcggcgtttcgccgtggttgccgcatctacagaacatactgccaatgccgcatgagtcaccacaggcctgcggccacatggtgattcatgtggcagtgtcgattcatagtaatgcttagtaaggtgaccgactgtccttc

SEQ ID NO: 18945 - RNA, 188 nt, unidentified
  source 1..188: mol_type = other RNA; note = Related to JABHSU010000643.1; note = Planctomycetaceae bacterium
aaaatgcgatagccttggcgttttatagggtgatgtttcgtcatccttggaaattgcagttgggaaaggtatttgtgctgcccgtagcatacggtgcagttaaaacttgccttgcttcgctgcgttatttttaactgcaccgtatgctacgggcagcattggcatagccatagcagggagtcgtctta

SEQ ID NO: 18946 - RNA, 180 nt, unidentified
  source 1..180: mol_type = other RNA; note = Related to PBCP01000062.1; note = Planctomycetaceae bacterium
cgatagccttggcgaattatagggtgatgtttcgtcatccttgtttaacattgcgacgagcggaaattgtgcaacactacggaaagctcaatttcattactacgcttcgcttcgtaatgaaattgagctttccgtagtgttgcattggcgtagccacagcagggaatcgtcggggttggc

SEQ ID NO: 18947 - RNA, 180 nt, unidentified
  source 1..180: mol_type = other RNA; note = Related to NZVD01000016.1; note = Rhodopirellula sp.
ggtcagatagccttggcgaattatagggcgatgcttcgtcgtccttgtaaattgctgcatcgaacgggatttgtgaacatcgtagataatacggcgttcctacgtcctcgcttcgctgcggagtaggaacgccgtattatctacgatgttcattggcatagccatagcaaggaatctgat

SEQ ID NO: 18948 - RNA, 165 nt, unidentified
  source 1..165: mol_type = other RNA; note = Related to PBHI01000033.1; note = Planctomycetaceae bacterium
acgatagccttggcgaataatagggcgatgtttcgtcgtccttgtaatttggttcgcggataagtagttgtgcgtacggttcgatccataaatcaagggtcgctccgctccgcctttatttatggatcgaaccgtacgcattggcattgccatagcaaggaatcg

SEQ ID NO: 18949 - RNA, 175 nt, Proteus sp.
  source 1..175: mol_type = other RNA; note = Related to JAEHOZ010000020.1; note = Proteus mirabilis
aattcaattacggagcggcgaagaattgtcgcgagggtgtgcatcatgcccgtttgcgaaggctaggcacagaaacaccgatggacaaacgtccattcgtgcttcgcccgactggacgtttgtccatcgttgtaaatttaatgaaaagaacagtgtcatgaatgccgcgccgctc

SEQ ID NO: 18950 - RNA, 170 nt, unidentified
  source 1..170: mol_type = other RNA; note = Related to NZ_ML064597.1; note = Parashewanella spongiae
aattcaaatacggagcggcgaaaaattgtcgcgagggtgtgcatcatgcccgtttgcgaaggctagacacagaaacaccgatggacaaacgtccattcgtgcttcgcccgactggacgtttgtccatcgttgtaaatttgatgaaaagtacagtgtcatgaatgccgcgc

SEQ ID NO: 18951 - RNA, 157 nt, unidentified
  source 1..157: mol_type = other RNA; note = Related to SIHM01000015.1; note = Alteromonas sp.
tttacctacggagcggcgaatgattgtcgcgagggtgtggatcatgcccgtttgcgaaggctagacacagaaacaccgatggacaaacgtccatccgtgcttcgcccggctggacgtttgtccatcgttgtaaattttattaaaagtacagtgtcat

SEQ ID NO: 18952 - RNA, 171 nt, unidentified
  source 1..171: mol_type = other RNA; note = Related to VFRR01000008.1; note = Maribrevibacterium harenarium
tgcaaaaacggagcggcgaagaattgtcgcgagggtgtgcatcatgcccgtttgcgaaggctagacacagaaacaccgatggacaaacgtccatccgtgcttcgcccggctggacgtttgtccatcgttgtaaattttttgaaaagtacagtgtcatgaatgccgcgccgc

SEQ ID NO: 18953 - RNA, 158 nt, Vibrio sp.
  source 1..158: mol_type = other RNA; note = Related to NZ_CP025796.1; note = Vibrio owensii
taaaaaacggagcggcgataaattgtcgcgagggtgtgtatcatgcccgtttgcgaaggcttgacacagaaacaccgatggacgaacgtccatccgtgcttcgcccggctggacgttcgtccatcgttgtaaacatcttgaaaagtacagtgtcatga

SEQ ID NO: 18954 - RNA, 167 nt, Vibrio sp.
  source 1..167: mol_type = other RNA; note = Related to RDPS01000003.1; note = Vibrio anguillarum
taaaaaacggagcggcgataaattgtcgcgagggtgtgtatcatgcccgtttgcgaaggcttgacacagaaacaccgatggacgaacgtccatccgtgcttcgcccggctggacgttcgtccatcgttgtaaacatattgaaaagtacagtgtcatgaatgccgcgc

SEQ ID NO: 18955 - RNA, 170 nt, unidentified
  source 1..170: mol_type = other RNA; note = Related to PGZF01000003.1; note = Gammaproteobacteria bacterium HGW-Gammaproteobacteria-15
tatattgcatgggagcggcgatgaattatcgcgagggtgtgaatcatgcccgcttgcgaaggctagacacagaatcaccgatggacaagcgtccatccgtgcattcgcccaaatggacgcttgtccatcgtcgaaacttatttatgagatttgtgtcatgaatgccgcgc

SEQ ID NO: 18956 - RNA, 161 nt, Acinetobacter sp.
  source 1..161: mol_type = other RNA; note = Related to JAEDYI010000001.1; note = Acinetobacter bereziniae
tggctttaggagcggtgaaacagttacgcgagggtgtgtatcatgcccgtttgcgaaggctagacacagaatcactgatggacttgagtccactagtgcttcgcccaattggactcaagtccatcattgaaacattttgaattttgagaattgtgtcatga

SEQ ID NO: 18957 - RNA, 175 nt, unidentified
  source 1..175: mol_type = other RNA; note = Related to JACBJC010000018.1; note = Serratia fonticola
attatgctttaggagcggtggtttattttcgcgagagagtgtatcattctcgttagcgaaggccagacacagaagcatcgatggacatgcgtccattcgtgcttcgcacaactggacgcatgtccatcgttgtcaataaactgattagctaaggtaagtgtcatgaatgccgcac

SEQ ID NO: 18958 - RNA, 163 nt, unidentified
  source 1..163: mol_type = other RNA; note = Related to NZ_WRPA01000017.1; note = Shewanella insulae
tatggattaggagcggcggtgaattatcgcgagggtatgaatcatacccgctggcgaaggctaggcacagaagcatcgatggactcacgtccatcttcgcttcgctcatcaggacgtgagtccatcgttgagaaagaaataatgttaaagagatttgtgtcat

SEQ ID NO: 18959 - RNA, 164 nt, unidentified
  source 1..164: mol_type = other RNA; note = Related to NZ_KB893650.1; note = Kangiella aquimarina
attttttaggagtggtgctaatggtttgcgagggtgtgtatcatgcccgtgagcaaagagctaatatagaagggtgttggatacttatcctgcgctccttcgaagcacatgataagtatccaacacgcacaaagaaactgttttgtattaaggcgtcagtgcta

SEQ ID NO: 18960 - RNA, 181 nt, unidentified
  source 1..181: mol_type = other RNA; note = Related to JAFEDC010000007.1; note = Proteobacteria bacterium
aattgattcgagaagtggcgatttttaatcgtgagggtgtgtatcatgcccgtttgcgaaggctaggcatagaaggcggacggataattatctgccgatccttcgaatcgacagataattatccgtcggcattgaagaaacttaaatagatattgtgtatgccatgatagctccgccactt

SEQ ID NO: 18961 - RNA, 178 nt, unidentified
  source 1..178: mol_type = other RNA; note = Related to JAFIUX010000008.1; note = Nitrospira sp.
aattacagagaggagtggcggtttgtggtcgcgagggtatgtatcatgcccgtttgcgaaggctaggcacagaagggcggcggaagattctcagtcgctccttcgaaccggctgagaatcttccgccggcatcaaagaaactcgaactggatttagtgccatgttagctccgccactc

SEQ ID NO: 18962 - RNA, 165 nt, unidentified
  source 1..165: mol_type = other RNA; note = Related to PGFZ01000010.1; note = Methylovulum psychrotolerans
taaattcgggagaggaggttattactcgcgagggtgtgcatcatgcccgtatgcgatggctaggtacagaagaagcgatgaaataaatccaccgctccttcgaatcgatggatttatttcatcgctttcttaaagaaactattatttttactatgaaagccccgc

SEQ ID NO: 18963 - RNA, 175 nt, unidentified
  source 1..175: mol_type = other RNA; note = Related to VENC01000012.1; note = Marinobacter adhaerens
aatattcgtggggagcggcggctccaactcgtgagggtgtgtatcatgcccgtttgcgaaggctaggcacagaaggtcggtggaacaaagcccatcgctccttcggatcgctggactttgttccaccgatatcaaagaaacgtattgagatagtgtcatgatagccgcgccgctc

SEQ ID NO: 18964 - RNA, 177 nt, unidentified
  source 1..177: mol_type = other RNA; note = Related to CP064972.1; note = Holophagales bacterium
cactagtctgaatggcggcggctttgcgcgcgggcgtgcatcacgcccagccgttgcgcaggtcagccacagaagggcgccggctcctcgccggtcgctccttcggatcgctcgacgaggagccggcgatctcaatgaaagcctccgggctttgctaatcccgtgaagccgccgcca

SEQ ID NO: 18965 - RNA, 178 nt, unidentified
  source 1..178: mol_type = other RNA; note = Related to JAGQSE010000087.1; note = Acidobacteria bacterium
aacttcatcttcgcggcggaggtgttccgcgagggtgtgcatcacaccccttttgcgaaggctagtcatagaagggcgccagctcagaggccggcgctccttcagatcaccggcctctgagctggcggtcccaacgaaagctttgatagctttgctcttcccgtgaacactccgccgc

SEQ ID NO: 18966 - RNA, 167 nt, unidentified
  source 1..167: mol_type = other RNA; note = Related to JADFXO010000295.1; note = Nitrospirae bacterium
gctattttataggaatggcggaatggaatcgtgagggtgtgtatcatgcccaattgcgaaggtcaggcacagaaggacgacggcctaacggctgtcgttccttcgtcgcgccagccgttaggccgtcgtcatcatcgaaagtaagtaaaactttgctgtcgccatga

SEQ ID NO: 18967 - RNA, 176 nt, unidentified
  source 1..176: mol_type = other RNA; note = Related to JAHJTB010000218.1; note = Proteobacteria bacterium
taaaacaaggagaggtggagattcctcgcgcgggtatgtatcatgccctgaagcgaagatcaggcacagaagggcggctgccaatcggctgtcgctccttcgaaccgaacagccgattggcagccggaactcacgtaagtcctatggacttagcttaagccatgaatgctccacct

SEQ ID NO: 18968 - RNA, 186 nt, Pseudomonas fluorescens
  source 1..186: mol_type = other RNA; note = Related to QFOU01000006.1
ggtagtctctattcggtggtgcctgcttgcgagggtttgtatcattcccatttgcaaagaccagacacagaagatcgccgaatcgaaaggccgattttactgcgaaaaatcgccctttcgactcggcgattccaatgaaagcatttttagctttgctagtaaggttgtctaatgcagtcaccacca

SEQ ID NO: 18969 - RNA, 170 nt, Citrobacter sp.
  source 1..170: mol_type = other RNA; note = Related to NZ_LT556085.1; note = Citrobacter amalonaticus
gatatgttcatgttggtagtggcgttcacgagagcatgtatcatgctcatttgtgaaggtcgcggacagaatgggcgcctgcaaatcagcagtcgttccttcgaaacgtctgctgattcgcaggcgtcatcaacgaaagttttcatcagctttgcttaaggattgaccta

SEQ ID NO: 18970 - RNA, 170 nt, unidentified
  source 1..170: mol_type = other RNA; note = Related to AP022438.1; note = Raoultella planticola
ggtaaatttcagttggtagtggcgttcacgagagcatgtatcatgctcatttgtgaaggtcgcggacagaatgggcgcctgcaaatcagcagacgttccttcgaaacgtctgctgattcgcaggcgtcatcaacgaaagttttcatcagctttgcttaaggattgaccta

SEQ ID NO: 18971 - RNA, 170 nt, Salmonella sp.
  source 1..170: mol_type = other RNA; note = Related to AAIGLR010000001.1; note = Salmonella enterica
ggtatattcgcgttggtagtggcgttcacgagagtatgcatcatgctcatttgtgaaggtcgcggacagaatgtgcgcctgcgaatcagcagtcgttccttcgaaacgtctgctgattcgcaggcgtcatcaacgaaagttttcatcagctttgcttaaggattgacctt

SEQ ID NO: 18972 - RNA, 173 nt, unidentified
  source 1..173: mol_type = other RNA; note = Related to NZ_CM001857.1; note = Musicola paradisiaca
gatatttttacttcggtagtggcgttcacgagagtgtgtatcatgctcatttgtgaaggtcgcgtacagaatgtgcgcctgtgaatcagcaggcgttccttcgaaacgcctgctgattcacaggcgtcatcaacgaaagttttcatcagctttgctaaggaatgaccttatga

SEQ ID NO: 18973 - RNA, 173 nt, unidentified
  source 1..173: mol_type = other RNA; note = Related to JABLUT010000044.1; note = Pantoea agglomerans
gttatttttaaatcggtagtggcgttcacgagagtgtgtatcatgctcatttgtgaaggtcgcgtacagaatgtgcgcctgcaaatcagcaggcgttccttcgaaacgcctgctgattcacaggcgtcatcaacgaaagcttccatcagctttgctaaggaaagaccttatga

SEQ ID NO: 18974 - RNA, 170 nt, unidentified
  source 1..170: mol_type = other RNA; note = Related to JAAQVS010000001.1; note = Morganella morganii
gatagtctaagagaggtagtggcgttcacgagagtatggatcatactcatttgtgaaggtcacgcacagaatgggcgcctgcaaatcagtaggcgttccttcgaaacgtctactgattcgcaggcgtcatcaacgaaagttttcatcgactttgcttaaggaatgaccta

SEQ ID NO: 18975 - RNA, 169 nt, unidentified
  source 1..169: mol_type = other RNA; note = Related to NZ_CP082360.1; note = Klebsiella sp.
gttatttttaacgttggtagtggcgttcacgagggtgtgtatcatacccatttgtgaaggtcgcgtacagaatgtgcgcctgtgaagcagcaggcgctccttcgaaacgcctgctgcttcacaggcgtcatcaacgaaagcctcatcagctttgcttaaggactgacct

SEQ ID NO: 18976 - RNA, 170 nt, Enterobacter sp.
  source 1..170: mol_type = other RNA; note = Related to NZ_KN549084.1; note = Enterobacter asburiae
ggtaatttactgtcggtagtggcgttcgcgagagtgtgtatcacactcatttgcgaaggtcgcggaaagaatgggcgcctgagaagcagcaggcgttccttcgaaacgcctgctgcttctcaggcgtcatcaacgaaagttttcatcagctttgctaaaggatggacctt

SEQ ID NO: 18977 - RNA, 183 nt, unidentified
  source 1..183: mol_type = other RNA; note = Related to NZ_CP009801.1; note = Yersinia intermedia
taaagtccttatcggtggtggcggaatcacgagagtatgtatcatgctcatttgtgaagatcatgcacagaagggcgcctgcacacaggcagacgctccttcgaatcgtctgcctgtgtgcaggcggcatcaacgaaagctatcagctttgctaaaggtagatctatgagaacgccaccacca

SEQ ID NO: 18978 - RNA, 178 nt, unidentified
  source 1..178: mol_type = other RNA; note = Related to DOQQ01000002.1; note = Comamonas kerstersii
tagatttgtcctcggtgatagcgcctaggtgtgggcatgtatcatgcccgtttgctaagaccatcgacagaaggatgcctgccgcaaggcgggtgctccttcgaatcacccgccttgcggcaggcttcatttacgaaggcttttttgctttgctttatcgatgaaggcactatcacca

SEQ ID NO: 18979 - RNA, 180 nt, unidentified
  source 1..180: mol_type = other RNA; note = Related to FCLB01000008.1; note = Serratia marcescens
aactatatgcggtggtggtgaagtcgcgagagtgtgtatcacgctcattagcgaagatcatccatagaagggcgcctgtacgcaggcagacgctccttcgaatcgtctgcctgcgtacaggcggcatcaacgaaagcgatcagctttgctaaaggtagatctatgaaaacttcaccacca

SEQ ID NO: 18980 - RNA, 175 nt, Pseudomonas sp.
  source 1..175: mol_type = other RNA; note = Related to FTMP01000014.1; note = Pseudomonas alcaligenes
ggtaggtttcgctcggtggtggcgtcgcgagggcgtgtatcatgcccatcagcgaagaccatgcacagaagggcgcctgcgaaaaggcagcgcctccttcggattcgctgcctttccgcaggcggcaacaacgaaagccaagacagctttgcttgtatgggaacgccaccaccac

SEQ ID NO: 18981 - RNA, 180 nt, unidentified
  source 1..180: mol_type = other RNA; note = Related to DMTT01000123.1; note = Idiomarina loihiensis
tagatttggcttgtagttctgctttccgtgagggtgtgcatcatgccctttagttatagtccagcgcaagaaggtgcgcctgcattcctgcagagcctccttcgaagtccctgcaggaatgcaggcggcatatacgaaagtttacctttgctcgggagttggatttgaaagcagaactac

SEQ ID NO: 18982 - RNA, 178 nt, unidentified
  source 1..178: mol_type = other RNA; note = Related to JAIENL010000062.1; note = Burkholderiaceae bacterium
taaattcagcttcggtggtagtgccagcgcgagggcgtgcatcacgcccattagcgaagactatgtacagaaggaagcctgccgaaaggcgggcgctccttcgaatcacccgcctttcggcaggcttcatcaacgaaggctctttagccttgcttttgcagtgaaggcgctaccacca

SEQ ID NO: 18983 - RNA, 178 nt, unidentified
  source 1..178: mol_type = other RNA; note = Related to NZ_CP017476.1; note = Hydrogenophaga crassostreae
tagatttgtcatcggtggtggcaccatcgcgcgagtgtgtatcacactcatcagcgaagaccatcgacagaaagaagcctgccgaaaggcgggcgctccttcgaatcacccgcctttcggcaggcttcatttacgaaggctactcagccttgctcttccggtgaaggcgccaccacca

SEQ ID NO: 18984 - RNA, 181 nt, unidentified
  source 1..181: mol_type = other RNA; note = Related to JAGNNA010000003.1; note = Reyranella sp.
ggtagcgtttctatggtggtggtgtcatcgcgagggtgtgtatcatgcccattagcgaagactagccttagaaggaacgccggctgagtggccgtcgctccttcgaatcgacgcccactcagccggcgttcacaacgaaagctctaacagctttgctgctcccgtgaaggcaccaccacta

SEQ ID NO: 18985 - RNA, 180 nt, Chromobacterium sp.
  source 1..180: mol_type = other RNA; note = Related to NZ_JYKA01000004.1; note = Chromobacterium subtsugae
gatagaatccttacgtggtggtgtagtcgtgtgggtgtgtatcatgcccatgagtgacgaccgggcacagaagtgcagcctgtctaacggcagctgctccttcgaatcagctgccgttagacaggctacattgacgaaagtatctttttagactttgctaccttgaacacaccaccactc

SEQ ID NO: 18986 - RNA, 175 nt, unidentified
  source 1..175: mol_type = other RNA; note = Related to RQIZ01000001.1; note = Paraburkholderia tropica
gatatactgcgtccggcggtgtgttccgcgtgagtgcgtatcgcgctcgaatgcgaaggccgaggacagaagggagcctgccgaacgacggccgatccttcgaatcgtccgccgttcggcaggcgtcacaacgaaagccatcacagctttgctcttcccgtgaacacaccgcccc

SEQ ID NO: 18987 - RNA, 175 nt, unidentified
  source 1..175: mol_type = other RNA; note = Related to NZ_JJMR01000016.1; note = Burkholderia sp.
gatacaatcggaccggtggcgtgtttcgcgtgagtgcgtatcgcactcgtatgcgaaggccgtatatagaagggggcctgccgaagggcggccgctccttcgaatcgtccgcccttcggcaggcggctcaacgaaagcaatctcagctttgctcttcccgtgaacacgccaccac

SEQ ID NO: 18988 - RNA, 175 nt, unidentified
  source 1..175: mol_type = other RNA; note = Related to JAEDZZ010000001.1; note = Burkholderia oklahomensis
gatatactcgccccggtggcgtgtttcgcgagagtgcgtatcgcgctcatttgcgaagaccatggacagaagggtgcctgccgaacggcggccgctccctcggatcgtccgccgttcggcaggcgactcaacgaaagcaatctcagctttgctcttcccgtgaacacgccaccac

SEQ ID NO: 18989 - RNA, 147 nt, unidentified
  source 1..147: mol_type = other RNA; note = Related to NZ_RBXL01000001.1; note = Thiocapsa rosea
ggaaggtaaaaacttgcgatggggcgcaacgccccagcttgcaaaggtctggtacagaaggttcggtcgggttcgcaccgaagatgcttcgcatcttcggcacgaacccgaccggcgctcaacgaaagcgatctgcgctttgcttta

SEQ ID NO: 18990 - RNA, 147 nt, unidentified
  source 1..147: mol_type = other RNA; note = Related to NZ_CP073100.1; note = Luteolibacter ambystomatis
gcgcatctctctactgcgagagggtgcatcatcctcattagcagaggtctacgacagaagggccggcggccatgcggcgaccgccccttcggttcggatcgccgcatggccgccggatctcaacggaagttctcaacacttcgcttt

SEQ ID NO: 18991 - RNA, 180 nt, unidentified
  source 1..180: mol_type = other RNA; note = Related to NZ_BCNS01000018.1; note = Marinobacterium profundum
tgtggccgggagtggtggaaaaagatcacgcaggtgtgcatcatgcctattagtgaaggcttaccacagaagggccggcagtctattggcctccgccccttcgggacgtcagccaatagactgccgtcatcaacgaaagtcaaccgactttgctataattaagctatgaatattccacca

SEQ ID NO: 18992 - RNA, 175 nt, unidentified
  source 1..175: mol_type = other RNA; note = Related to CABVLY010000035.1; note = Burkholderia anthina
gatagactacgcacggcggtgtgttgcgcgagagtgtgcatcacactcacatgcgaagacccttcgacagaaggacgcctgccgaacggcgggcgatccttcgaatcgcccgccgttcggcaggcggcgtcaacgaaagcaaccagctttgctcttcccgtgaacacaccgccac

SEQ ID NO: 18993 - RNA, 175 nt, unidentified
  source 1..175: mol_type = other RNA; note = Related to NZ_CP034197.1; note = Ralstonia solanacearum
gatagactgccgacagcggtgtgttgcgcgagagtgtgcatcacactcatttgcgaagaccgcacgatagaaggacgcctgacgaacggcggacgatccttcgaatcgcccgccgttcgtcaggcggcggcaacgaaagcaaccagctttgctcttcccgtggacacaccgctac

SEQ ID NO: 18994 - RNA, 172 nt, Azotobacter beijerinckii
  source 1..172: mol_type = other RNA; note = Related to FNYO01000057.1
agtaccctgagtgagtgggagcctcaggcgagggtgtgtatcatgcccatctgccaagatcctgcaaagaagggcaccggtcacatggccggcactccttcggagcaccggccatgtgaccggcgcagtacgaaagcaatttaaggctttgctaagtatgaggctcccacac

SEQ ID NO: 18995 - RNA, 172 nt, Pseudomonas sp.
  source 1..172: mol_type = other RNA; note = Related to PTLV01000220.1; note = Pseudomonas oleovorans
aggatcctattgttgtgggagcctcaggcgcgggtgtgtatcatgcccaattgccaagatccaccatagaagagctccggccagcgagccggcacgccttcggcgcaccagctcgctggccggcgctttacgaaagcaatttaaggctttgctaagtatgaggctcccacaa

SEQ ID NO: 18996 - RNA, 173 nt, Azotobacter beijerinckii
  source 1..173: mol_type = other RNA; note = Related to NZ_FOFJ01000068.1
cgtaatctagtgtcgtgggagcctcaggcgagggtgtgtatcatgcccgttctgccaagacccaccaaagaagggcaccgtggaggcacacggcgctccttcgaagcaccgcgtacctccacggtgcaatgcgaaagcaacttgaggctttgcttagtatgaggctcccaccc

SEQ ID NO: 18997 - RNA, 167 nt, unidentified
  source 1..167: mol_type = other RNA; note = Related to NZ_SPUM01000038.1; note = Massilia horti
tgtaatattcgagcgtgggagcctcgacgagagtgtgtatcacactcatttgtcaagacttatcatagaagggtgccggaaaactctccggcgctccttcgaagcaccgaagatttttccggccccaaaacgaaagttaaaaactttgctaaatgaggctcccactt

SEQ ID NO: 18998 - RNA, 163 nt, unidentified
  source 1..163: mol_type = other RNA; note = Related to NZ_JAGIXE010000037.1; note = Acidocella facilis
gtaacttggtgtccgtggggcctcaggcgagggcgtgcagcacgcccattgcgccaagactaatgacagaaggatgccgtcgtttgggcggtgttccttcgaaacacagcccaaacgacggcatctcgatgaaagtcaactttgctatatgaggctcccacac

SEQ ID NO: 18999 - RNA, 166 nt, unidentified
  source 1..166: mol_type = other RNA; note = Related to WMBU01000038.1; note = Rhizorhabdus histidinilytica
gataaatgtcgcttgtgggagcttcaggcgagagcgtgcatcacgctcactgcgccaagaccgaggttagaagggatgccggcggtctcgccgacgctccttcgaaccgccgacgagaccgccggcactccatgaaagtgaactttgctatatgaggctcccacaa

SEQ ID NO: 19000 - RNA, 164 nt, unidentified
  source 1..164: mol_type = other RNA; note = Related to NZ_JAIZQS010000002.1; note = Burkholderia cepacia
ataaacttcttcgcgcgggagcttcggcgcgggtgtgtatcacacccactcgccaagatcagggacagaaggattccggcgaaatggctggggatccttcgaatccccagccatttcgccggctacactacgaaagctacctttgctaaatgaggctcccgctc

SEQ ID NO: 19001 - RNA, 165 nt, unidentified
  source 1..165: mol_type = other RNA; note = Related to NZ_CADFBE010000001.1; note = Burkholderia gladioli
gataaactgcccctcgcgggagcttcggcgcgggcgtgtatcacgcccactcgccaagatcagggacagaaggattccggcgaaatggctggggatccttcgaatccccagccatttcgccggctacacaacgaaagctaactttgctaaatgaggctcccgccc

SEQ ID NO: 19002 - RNA, 164 nt, unidentified
  source 1..164: mol_type = other RNA; note = Related to NZ_CADFGI010000002.1; note = Paraburkholderia sp.
agtagacttcgcgctgcgggagcttcggcgcgggtatgcatcatacccactcgccaagatcatggacagaaggattccgacgaaatggccggtgatccttcgaatccccgaccatttcgtcggctctaaacgaaagaaaactttgctaaatgaggctcccgcaa

SEQ ID NO: 19003 - RNA, 165 nt, unidentified
  source 1..165: mol_type = other RNA; note = Related to CAJNAS010000001.1; note = Paraburkholderia domus
ggtagacttccacgtgcgggagcttcggcgcgggcgtgcatcacgcccactcgccaagatcagggaaagaaggattccgacgaaatggccggtgatccttcgaatccccagccatttcgccggctctacaacgaaagtaacctttgctaaatgaggctcccgcaa

SEQ ID NO: 19004 - RNA, 166 nt, unidentified
  source 1..166: mol_type = other RNA; note = Related to JAAGNS010000286.1; note = Proposed Ferrovum sp.
gtaatctgatgggcgcgggagcctcggcgcgggtgtgtatcatgcccatttgccaagattacgggatagaagggttccggagaaatggccggagatccttcgaatctccggccatttctccggccgccttgcgaaagcattgctttgctaaatgaggctcccgcaa

SEQ ID NO: 19005 - RNA, 165 nt, unidentified
  source 1..165: mol_type = other RNA; note = Related to JAJTWT010000001.1; note = Pelomonas sp.
ggtaagcttgtcttgcgggagcctcaggcgagggtatgaatcatgcccgcttgccaagaccttgcatagaaggagccggataaacgcccgcgtctccttcgaagccacagtcgtttatccggctgcaatacgaaagctaagctttgctgaatgaggctcccgcac

SEQ ID NO: 19006 - RNA, 166 nt, unidentified
  source 1..166: mol_type = other RNA; note = Related to MWOL01000027.1; note = Rhodococcus sp.
ttaagctgcgttctgcgggagtctcaggcgcgggtgtgcatcatgcccatttgccaagaccacggatagaaggaggcctgagaactggctggggctccttcgaatccccagccagttctcaggccgcattacgaaagctttgctttgctaaatgagactcccgcaa

SEQ ID NO: 19007 - RNA, 172 nt, unidentified
  source 1..172: mol_type = other RNA; note = Related to SSEM01000053.1; note = Desulfurellales bacterium
ctaacctttttgatgcgggagcctcaggcgagggtgtgcatcacactcaggtttgttgccaaggtccgggaaagaagggtcgccgacgaatcggctgcggctccttcgaaaccacagccgattcgtcggcgcttaacgaaagcttttgctttgctatatgaggctcccgcaa

SEQ ID NO: 19008 - RNA, 164 nt, unidentified
  source 1..164: mol_type = other RNA; note = Related to PTEU01000002.1; note = Ideonella sp.
gataatcttgctgtgcgggagtctcggcgcgggtgtgaatcatgcccattcgccaagatcacggatagaagggatccggcgaactggctgcggctccttcgaatccgcagccagttcgccggctccaaaacgaaagttgactttgctaaatgaggctcccgcac

SEQ ID NO: 19009 - RNA, 167 nt, unidentified
  source 1..167: mol_type = other RNA; note = Related to CP034464.1; note = Undibacterium parvum
gatacgatagcaacgtgggggtctcggcgagagtgtgtatcatgctcaatttgccaagattatgctttagaagggtgccgtaaaaagattcggtgctccttcgaagccccgaatatttttacggctcctatatgaaagttagactttgctaaatgaggctcccacaa

SEQ ID NO: 19010 - RNA, 167 nt, unidentified
  source 1..167: mol_type = other RNA; note = Related to MDDY01000002.1; note = Xanthomonas arboricola
ggtagcctatgcctgcgggagcctcaggcgcgggtgtgcatcatgcccatttgcctaggttcagtagttagaaggtgccggcgaatcagccggcgctccttcgaagcgccgtctgcttcgccggcgcttaacgaaagcatttgctttgctatatgaggctcccgccc

SEQ ID NO: 19011 - RNA, 167 nt, unidentified
  source 1..167: mol_type = other RNA; note = Related to NZ_MOYM01000001.1; note = Stenotrophomonas sp.
gatagtctatacaggcgggagcctcaggcgcgggtgtgtatcatgcccaattgcccaggcccggtagttagaagggtgccgtcgaatcagccggcgctccttcgaatcgccgtccgattcgacggcgctcaacgaaagcattgctttgctatatgaggctcccgctc

SEQ ID NO: 19012 - RNA, 164 nt, unidentified
  source 1..164: mol_type = other RNA; note = Related to NZ_VOHK01000004.1; note = Luteimonas marina
actaggatgaccttgcgggagcctcaggcgagggtgtgtatcacgcccatcaagccaaggtcgaggatagaaggtgccggcgaagcggccgacgatccttcgaatcgccggccgcttcgccggcgcacaacgaaaaatcattttgctaaatgaggctcccgcac

SEQ ID NO: 19013 - RNA, 166 nt, unidentified
  source 1..166: mol_type = other RNA; note = Related to NZ_KI535289.1; note = Agrobacterium sp.
ttaaacagtttgtcgtgggagcttcaggcgagggtgtgcatcatgcccaaatgccaagactggtacatagaagaccgccgtgagcttgactcgcggtccttcgaaccgagagtcaagctcacggcacttaacgaaagatagctttgctaaaatgaggctcccacac

SEQ ID NO: 19014 - RNA, 166 nt, unidentified
  source 1..166: mol_type = other RNA; note = Related to QFOR01000002.1; note = Shinella sp.
gttaaacagttgtcgtgggagcttcaggcgagggtgtgcatcatgcccaaatgccaagactggtacatagaagagcgccgtgagcttgactcgcggtccttcgaaccgagagtcaagctcacggcacttaacgaaagatagctttgctaaaatgaggctcccacac

SEQ ID NO: 19015 - RNA, 164 nt, unidentified
  source 1..164: mol_type = other RNA; note = Related to WIFE01000020.1; note = Rhizobium laguerreae
aatagaaggatgttgtgggggcttcaggcgcgggtgtgtatcatgcccactagccaagactgtgataagaaggttgccgtaagcacagctcacgctccttcgaatccctcgccgtgcttacggcactcaacgaaagatagctttgctaaatgaagctcccacgc

SEQ ID NO: 19016 - RNA, 164 nt, unidentified
  source 1..164: mol_type = other RNA; note = Related to NZ_LMNG01000030.1; note = Methylobacterium sp.
ggtaacgtgatggcgcgggagtctcaggcgcgggtgtgtatcatgcccatttgccaaggttaaacacataaggtcgccgtctaaagcggcggccttccttcgaaagtccaccactttagacggcactctacggaagcttgcttcgctaaatgagactcccgcaa

SEQ ID NO: 19017 - RNA, 164 nt, unidentified
  source 1..164: mol_type = other RNA; note = Related to NZ_CP010735.1; note = Phaeobacter inhibens
gtaaggatgaaggtgcggaagcctcaggcgcgggtgtgcatcatgcccatttgccaagactacacacagaagggtcgtcgttcttcggacgaacgctccttcgaagcgcacgtccaaagaacgacgcttatgaaaccaaggtttgctaaatgaggcttccgcaa

SEQ ID NO: 19018 - RNA, 164 nt, unidentified
  source 1..164: mol_type = other RNA; note = Related to NC_003911.12; note = Ruegeria pomeroyi
catagtttgtcgttgtggaagcctcaggcgcgggtgtgcatcatgcccatttgccaagactacatacagaagggtcgtcggtcttcgaactggcgctccttcgaagcgccagttcgaagaccgacgctcatgaaacgattgtttgctaaatgaggcttccgcac

SEQ ID NO: 19019 - RNA, 164 nt, unidentified
  source 1..164: mol_type = other RNA; note = Related to NZ_FNEJ01000006.1; note = Salipiger marinus
gctataatcacatcgcgggagtctcaggcgcgggtgtgtatcatgcccacttgccaaggctatgtacagaagggtcgtcggtcttcggactgacgctccttcgaatcgtcagtccgaagaccgacgctcatgaaacgattgtttgctaaatgagactcccgcac

SEQ ID NO: 19020 - RNA, 181 nt, unidentified
  source 1..181: mol_type = other RNA; note = Related to JAAFAL010000034.1; note = unidentified bacterium
aatagtgtgtctgggcgggtgcgtgaggactcggcgcgagtgtgcatcacactcactagccaagatcaggcacagaagggttcggctaagttccgccgggctccttcgaatcccggcgaaacttagccgacgccacaatgaaagccactaagctttgctaatgaggactacgcacccgcta

SEQ ID NO: 19021 - RNA, 163 nt, unidentified
  source 1..163: mol_type = other RNA; note = Related to JAIUPC010000007.1; note = Proteobacteria bacterium
ggtagctttgatgcgtgggagtctcaggcgcgggtgtgtatcatgcccatttgccaagactatgcatagaagggcaccggccatgtcgccggagctccttcgaatcaccgtcgacatggccggtgcttgcgaaagagacctttgctaaatgaggctcccacac

SEQ ID NO: 19022 - RNA, 163 nt, unidentified
  source 1..163: mol_type = other RNA; note = Related to JADCJU010000004.1; note = Roseomonas sp.
gctagcgttgaaatgtgggagcctcaggcgcgggtgtgcatcatgcccactagccaagactatgaaaagaaggacaccggctctgttgtcggcgctccttcgaatcgccgacaacagagccggcgctcacgaaagcgagctttgctaaatggggctcccacac

SEQ ID NO: 19023 - RNA, 164 nt, unidentified
  source 1..164: mol_type = other RNA; note = Related to NZ_CP041191.1; note = Labrenzia sp.
aataattttgacgtgtgagggcctcaggcgcgggtgtgtatcatgcccactagccaagactatacatagaagggttccgaccatgctgtcggcgctccttcgaaccaccaacaacatggtcggacacttatgaaagccagctttgctaaatgaggctctcacac

SEQ ID NO: 19024 - RNA, 163 nt, unidentified
  source 1..163: mol_type = other RNA; note = Related to NOXU01000023.1; note = Niveispirillum lacus
cgtaatcatggcatgtgggagtctcaggcgcgagtgtgtatcacgctcaactgccaagatctacgacagaagggccccggccatgtcgccgctgctccttcgaaccaccgccgacatggccggtgctcatgaaagcgagctttgctaaatgaggctcccacac

SEQ ID NO: 19025 - RNA, 184 nt, unidentified
  source 1..184: mol_type = other RNA; note = Related to JADLAT010000006.1; note = Alphaproteobacteria bacterium
gtaatctcggctgcgtgggagtctcgggcgcgagcgtgtatcacgctcaaatgctaagaccaaaaacagaaggattccggtggatgtaccggagctccttcgaacctccggtacatccaccggctctctcgaaagtgacctgttatttattaagagggatctttgctaaatgagactcccacac

SEQ ID NO: 19026 - RNA, 178 nt, unidentified
  source 1..178: mol_type = other RNA; note = Related to JABJKH010000091.1; note = Rhodospirillaceae bacterium
ttaacatgaaaagcgtgggagtctcaggcgcgggcgtgcatcacgctcaactgcctagaccaagaacagaagggcccggcttgtcagtcggtgctccttcgaatcaccgccagacaagccggtgctctcgaaaggtactcttaccgaaaggaacctttgctatatgaggctcccacaa

SEQ ID NO: 19027 - RNA, 164 nt, unidentified
  source 1..164: mol_type = other RNA; note = Related to CP045631.1; note = Roseibium aggregatum
cttagttttgtcgtgtgggaacttcgggcgaaggtgtgcatcacacctgcttgccgaggctagacgacagaaggttccgccatcttcgattggcgctccttcagaccgtcaatcgaagatggcggtacttacgaaaggtaactttgctaatgaggttcccacac

SEQ ID NO: 19028 - RNA, 163 nt, unidentified
  source 1..163: mol_type = other RNA; note = Related to NZ_FREX01000003.1; note = Pseudovibrio sp.
actaaggtttactcgtgggagtctcggcgagggtgtgtatcatgcccatttgctaagaccaaatacagaaggattccgccgaattcaccggcagtccttcgaacttccgatgaattcgtcggctccttacgaaaggttactttgcttaatgagactcccacac

SEQ ID NO: 19029 - RNA, 165 nt, unidentified
  source 1..165: mol_type = other RNA; note = Related to NZ_AXZR01000004.1; note = Sulfitobacter pontiacus
agtacatgtaaactgtggaaacctcaggcgcgggtgtgcatcatgcccttatgccaagaccagaacttagaaggacccgccatatctatttggcgctccttcgaaacgccaaatagatatggcggtactcttgaaaggttactttgctaaatgaggtttccacac

SEQ ID NO: 19030 - RNA, 161 nt, unidentified
  source 1..161: mol_type = other RNA; note = Related to NVXB01000069.1; note = Hyphomicrobiales bacterium
tatagacttgtattgtggaggtttcgacgagagtgtgcatcatgctcatttgttatgactaatcacagaagggtccgccatcttcggcgatgatccttcgaatcctcaccgaagattgcggtgcttttgaaagttgactttgctaaatgaaacctccacac

SEQ ID NO: 19031 - RNA, 179 nt, unidentified
  source 1..179: mol_type = other RNA; note = Related to RPGP01000001.1; note = Desulfobacteraceae bacterium Eth-SRB1
gaggaaaaaaaggaatcggttggcgcttcgccaacctcagatggtagcagtactttacaagattttgcgcggccaataaaatcggccgccgcacctcggtaccctcggcacaacggccgattttattggtcgcggatctcaaagcaactgaattttcaagttggtcttaatttttcctc

SEQ ID NO: 19032 - RNA, 180 nt, unidentified
  source 1..180: mol_type = other RNA; note = Related to JACQWO010000092.1; note = Desulfobacterales bacterium
gtacgagaacaggattcggttggcgattcgccatccacggaaggtagcataattttacaagagggtgcgtggccaataaaaccggccgctgctcctcgggttcctcggaccaccggccgattttattggccacggatctcaaagcaactaagtattgaagttggccctagtttttcgtcc

SEQ ID NO: 19033 - RNA, 161 nt, unidentified
  source 1..161: mol_type = other RNA; note = Related to JAHJDK010000078.1; note = Nanoarchaeota archaeon
gagcaaataaaggagttggttggcgattcgccaactgtgataggtagtagggaaatatacaagaggcatcggccaataattgcggccttgccatgcttcggccgaaattattggccgatgctcttaggacagcttttagctgaccctttgaagaacggctc

SEQ ID NO: 19034 - RNA, 178 nt, unidentified
  source 1..178: mol_type = other RNA; note = Related to JACXUH010000041.1; note = Betaproteobacteria bacterium
aagcgcatcaggaattggctggtgattcgccagccgtaaacagtagcggtaatacacaagagggcacgtggccaataagttcggccagtgaccctcgagtacctcgggtccctgtccgaacttattggccacgggtcgtaaggcaacttgatttcaaggttggttctgtaccgcgctc

SEQ ID NO: 19035 - RNA, 187 nt, unidentified
  source 1..187: mol_type = other RNA; note = Related to NZ_KB822693.1; note = Marinobacter sp.
taatggatcaagatttggatggcgcttcgccatcttcagaaattagttcaacattacaagagggctcgcgaccagtaggttctggttcgaagccttcgcggacggagccgactcgtcttcgaaccagaacctactggtcgcgggtctcagagcaacttagtgttcaggttggccttgatttccattc

SEQ ID NO: 19036 - RNA, 188 nt, Nitrosomonas sp.
  source 1..188: mol_type = other RNA; note = Related to SSFV01000001.1
gtagcgaaacaggatttggatggcgattcgccatcttcagaaagtagcacaatttcacaagaaggcacgcggccagtaaattctggctctgcgccttcgcgactaacgtcgacttgtcacagcaccagaatttactggccgcgagtcgttgagcaactgaattctaaagttggccttggttcccaaac

SEQ ID NO: 19037 - RNA, 184 nt, unidentified
  source 1..184: mol_type = other RNA; note = Related to PALV01000013.1; note = Gammaproteobacteria bacterium
atgtggctcaagattcggatggtgattcgccatcttcagaagctagtagtgcattacaagagggctcgcggccagtaaattctggctctgagccttcgcgaacggagtcgactcgtctcagagccagaatttactggccgcgggtctcagagcaacttctctcagttggtcttgatcgtcacac

SEQ ID NO: 19038 - RNA, 161 nt, Desulfovibrio sp.
  source 1..161: mol_type = other RNA; note = Related to ATHV01000015.1
gagcgaggcttggaattgactggcgattcgccagtcgtggagactagatatgttttacaaggtcgacggccaatagcaccggccgccggccccggcgtccggcgctattggccgtcgactttcaagcagctaaaaggttttgctggtccaaagcctcgctc

SEQ ID NO: 19039 - RNA, 161 nt, unidentified
  source 1..161: mol_type = other RNA; note = Related to WYDS01000022.1; note = Halodesulfovibrio sp.
catttagatctggatgcggatggtgcttcgccatccgataaaagaagtttcaagatacaagtgcccagaccaataaaaccgcttggtctcgcgcccgcacaattttattggtctggggcatacaggcagcttacatctacagctggtccaaattccactct

SEQ ID NO: 19040 - RNA, 161 nt, Desulfovibrio sp.
  source 1..161: mol_type = other RNA; note = Related to MLBG01000117.1
gggcggggattggagttgactggtgattcgccagtcatggacttgagttcagacaaacaaagtcgacgaccaataggccaggtcgtcgattccgccgatctggcctattggtcgtcgactttcaagcagctaaagcattcagctggtccactcccccgctc

SEQ ID NO: 19041 - RNA, 164 nt, unidentified
  source 1..164: mol_type = other RNA; note = Related to CP038027.1; note = Brevundimonas naejangsanensis
ggggaggcatcaaggttggtcggcgcttcgccgactttagacactagctcacccataaaaggaagcgtggccaataagtacggccaccacgttcctcctggccgtacttattggccacgcatctcaaggcagtttggcgtatcaactggcttgtccgcctcctc

SEQ ID NO: 19042 - RNA, 164 nt, unidentified
  source 1..164: mol_type = other RNA; note = Related to JAFLCS010000004.1; note = Caulobacterales bacterium
ggaggagcaacaaggttggtcggcgatgcgccgactttagaatctagctcaagcataaaaggatgcgcggccaataacttcggccacagcgttcctcgtgtccgaacttattggccacgcatttcaaggcagttcgatagatcaactggcttgtccgctccttc

SEQ ID NO: 19043 - RNA, 179 nt, unidentified
  source 1..179: mol_type = other RNA; note = Related to NZ_CP031417.1; note = Pseudolabrys taiwanensis
gagctcggtacggaattggctggtgtttcaccagcttcggataccagcactatcgtaaaaggacgcgcggccaataaccttggccgttcgtccttcggacgccgcttcgctaacggccaagcttattggccgcgcattcaagggcagttcattactcgaactggtccaacccggcgctc

SEQ ID NO: 19044 - RNA, 137 nt, unidentified
  source 1..137: mol_type = other RNA; note = Related to NZ_JACSDK010000013.1; note = Pelagibius marinus
gcgaaggggagtcgggcggcgcttcgccgccttcaaacctaaggtctctcatcgattcactcggccgaccccttgggtcgaccgaggacgatggcaaccaaccgcccacgcgggcgtggccggttgctcgccatcgt

SEQ ID NO: 19045 - RNA, 164 nt, unidentified
  source 1..164: mol_type = other RNA; note = Related to SRHQ01000067.1; note = Methylorubrum sp.
gaacagacaacggagtcgggcggcgtttcaccgcccttgttacaaagaacgaccttagaaggtaccggggccaatgagtgcggcccctcggttcctcggggccgcacccattggccccggtactcaaagcagttgactaaaacaactggttcgtcgtcctcctc

SEQ ID NO: 19046 - RNA, 151 nt, unidentified
  source 1..151: mol_type = other RNA; note = Related to VXOZ01000123.1; note = Chloroflexi bacterium
gttcaggcaacggaattgggcggcgcttcgccgtctgaggatgccagttcaacttcacaagggggctcggccaacaagagccggcccctcgttcctcggggtttggcttgttggcctcgcctctctaaggaattgcttattcgcccttcgc

SEQ ID NO: 19047 - RNA, 161 nt, unidentified
  source 1..161: mol_type = other RNA; note = Related to SSDV01000007.1; note = Sphingomonadales bacterium
gtcaaagcaacgggattggacggcgctgcgccgtctgcagatgtaagaccctcaaaaaaaggacccgaggccaataagcttggccccgtcgttcctagtggccaagcttattggcctcggttctctaggcagttatccgaacagactggctctttgccgac

SEQ ID NO: 19048 - RNA, 177 nt, unidentified
  source 1..177: mol_type = other RNA; note = Related to NZ_LAVN01000001.1; note = Burkholderia gladioli
ccccatacgcagaagtcggtcgatgtttcgtcgaccagtcgtactagcggtggtgaagacatacaagaggttccgcggccaacgaaaagttttggtcgcggcgagcgcgcccaagaacgttttccttggccgcggatctttgagcagataagtgatggatctggttctgctacggga

SEQ ID NO: 19049 - RNA, 179 nt, unidentified
  source 1..179: mol_type = other RNA; note = Related to QVIO01000003.1; note = Duganella sp.
gcgccagtcatgcagaagtcggtcgatgtttcgtcgaccatgcaaaacagtggtgagtacgtacaagaagttccgcggccaacgaaaagttgtaaccgcggcgagcgcggtcacgaacgttttcgttggccgcggatctacgagcagatgactaaaggatctggttctgctaacggtgc

SEQ ID NO: 19050 - RNA, 151 nt, unidentified
  source 1..151: mol_type = other RNA; note = Related to VMKF01000002.1; note = Geobacter sp.
gatcggcaacagatgggtggcgcttcgccatctggaagtgaaaaaattttgttaaaagaggttgcgcggccaattcgtacgaccgcgttgccacacggccgtacgaattggccgcgcatcggtaagcaattcctgcatagaaacgttgagc

SEQ ID NO: 19051 - RNA, 175 nt, unidentified
  source 1..175: mol_type = other RNA; note = Related to FNKY01000001.1; note = Nitrosospira multiformis
aattgggaaaagaagaattgactgatgcttcgtcagtctctttaattgaccttgttatacaagaagaggagcggccaataaacccggccgtaactcttggtaaagctcagagtgacggccgggtttattggccgcttctcgctaagcaactttttgttggctctattcctcaatc

SEQ ID NO: 19052 - RNA, 172 nt, unidentified
  source 1..172: mol_type = other RNA; note = Related to NZ_JAAOLY010000027.1; note = Janthinobacterium lividum
aagcgaaatcagagttggctgatgtttcgtcagctagtttaaatgacctcgtttcacaagaagagcagcggccaataagcgcgctcactcctcttcgctccactcatcgtcgcgagcccgcttattggccgcttctcggaaagcaacttctcgttggctctacagttcgctc

SEQ ID NO: 19053 - RNA, 168 nt, unidentified
  source 1..168: mol_type = other RNA; note = Related to PQGD01000012.1; note = Proposed Superficieibacter electus
actgatacagagaatatgggcggtgattcgccgtctttacagttaaggcacaatttaaaagaggttccgcacccaagcctgtcttgggctgcagggaccctgcccagcagcccaagacaggcttgggtgcggatctacgagcaattaaatattggttcgatgtccagt

SEQ ID NO: 19054 - RNA, 168 nt, unidentified
  source 1..168: mol_type = other RNA; note = Related to DACSPQ010000008.1; note = Serratia marcescens
actgatacagagaatatggacggtgattcgccgtctttacagttaaggcacaattcaaaagaggttccgcacccaagcctgccttgggctgcaggggccctacccagcagcccaaggcaggcttgggtgcggatctacgagcaattaaaaattggttcgatgtccagt

SEQ ID NO: 19055 - RNA, 168 nt, unidentified
  source 1..168: mol_type = other RNA; note = Related to LS483483.1; note = Klebsiella oxytoca
actgagtcaaagaaaatgggcggtgcttcgccgtcttcacagttaaggtttgttttaaaagatgctccgcacccaagtgttccttgggcgctcggggccctacccaatcacccaaggaacacttgggtgcggatcgctgagcaaattaattttggttcgatgcttagt

SEQ ID NO: 19056 - RNA, 144 nt, Escherichia coli
  source 1..144: mol_type = other RNA; note = Related to MOFU01000029.1
actgagtcaaagaaaatgggcggtgcttcgccgtctttacagttaaggtttgttttaaaagaggttccgcacccaagtgttccttgnncaaggaacacttgggtgcggatcgctgagcaaattaattttggttcgatgcttggt

SEQ ID NO: 19057 - RNA, 168 nt, unidentified
  source 1..168: mol_type = other RNA; note = Related to AP021929.1; note = Klebsiella pneumoniae
actgaaacagagaaaatgagcggcgattcgccgttcttaacgttaaggcacattttaaaagaggttccgcacccaagcctgccttgggcgaccgggaccctgcccagccgcccaaggcaggcttgggtgcggatctatgagcaattaaagattggttcgacgttcggt

SEQ ID NO: 19058 - RNA, 172 nt, unidentified
  source 1..172: mol_type = other RNA; note = Related to NZ_JADTXJ010000009.1; note = Serratia ureilytica
ctactgaaacaaagaatatgggcggcgaaccgccgtctttacagttaaggccttacataaaagaggttccgcacccaagcctgtcttgggcgtctgggaccttgcccagtcgcccaagacaggcttgggtgcggatctttgagcaattacgaattggttcaatgtccagtag

SEQ ID NO: 19059 - RNA, 171 nt, Enterobacter sp.
  source 1..171: mol_type = other RNA; note = Related to NZ_CP045769.1; note = Enterobacter cancerogenus
actgatacaaagaatatgggcggcgaatcgccgtctttgcagttaaggccatacataaaagaggttccgcacccaagcctgtcttgggcgtccgggaccttgcccagtcgcccaagacaggcttgggtgcggatctttgagcaattacgaattggttcaatgtccagtagt

SEQ ID NO: 19060 - RNA, 171 nt, Enterobacter sp.
  source 1..171: mol_type = other RNA; note = Related to NZ_CP087390.1
actgatacaaagaatatggacggcgcaccgccgtctttgcagttaaggccttacataaaagaggttccgcacccaagcctgtcttgggcgtccgggaccttgcccagccgcccaagacaggcttgggtgcggatctttgagcaattacgaattggttcaatgtccagtagt

SEQ ID NO: 19061 - RNA, 171 nt, Escherichia coli
  source 1..171: mol_type = other RNA; note = Related to NZ_NRWV01000070.1
actgatacaaagaatacgggcggtgaatcgccgtctttacagttaaggccttacataaaagaggttccgcacccaagcctgccttgggcgtccgggaccttgcccagccgcccaaggcaggcttgggtgcggatctttgagcaattacgaattggttcaatgtccagtagt

SEQ ID NO: 19062 - RNA, 171 nt, unidentified
  source 1..171: mol_type = other RNA; note = Related to JACVBT010000006.1; note = Pantoea sp.
actgatacaaagaatatgggcggcgattcgccgtctttacagttaaggcatgatttaaaagaggttccgcacccaggcctgtcttgggcgtccgggaccttgcccagccgcccaagacaggcctgggtgcggatctttgagcaattacaaattggttcaatgtccagtagt

SEQ ID NO: 19063 - RNA, 170 nt, Aeromonas sp.
  source 1..170: mol_type = other RNA; note = Related to NZ_CP038513.1
tcccctgaacagaataaggctagcgtttcgtcagccactatgtttaggtctactgtaaaagtagctccgtggccagaaaactctctggtctcggggcccctcccccaaaaccagagagttttctggccacgggtctcagagcaattaagaattggttctaatgcaggggg

SEQ ID NO: 19064 - RNA, 170 nt, Aeromonas sp.
  source 1..170: mol_type = other RNA; note = Related to NZ_CP033604.1; note = Aeromonas veronii
tcccctgaacagaatatggttagcgcttcgtcaaccattacgtttaggtctacgttaaaagtagctccgtggccagaaaactctctggtctcggggcccctcccccaaaaccagagagttttctggccacgggtctcagagcaattaaaaattggttctaactcggggga

SEQ ID NO: 19065 - RNA, 170 nt, Vibrio sp.
  source 1..170: mol_type = other RNA; note = Related to NZ_AP019654.1; note = Vibrio panuliri
tctcctgaacaggatgtggctggtgtatcaccacccaaagtgtttaggtcaagtttaaaagcagctccgtggccagaaaactctctgtccccaggggccctcccccaaacccagagagttttctggccacgggtctcagagcaattacagattggttctatctcagggga

SEQ ID NO: 19066 - RNA, 170 nt, unidentified
  source 1..170: mol_type = other RNA; note = Related to PIZK01000029.1; note = Alteromonadales bacterium alter-6D02
gcttctgaaagaaattcgggtggtgcatcaccacttaaacaagcaagctcaagcacaaaagtatcccctaggccagaaatttctctgtccccggggccccaaccccaaatccagagaaatttatggcctagggtatatttgcaattaaatattggttcaaaaccagaagc

SEQ ID NO: 19067 - RNA, 170 nt, unidentified
  source 1..170: mol_type = other RNA; note = Related to MBSN01000054.1; note = Alteromonas macleodii
gcttctgaaagaaatacgggtggtgcatcaccacttaagcaagcaagatcaagcacaaaagtatcccctaggccagaaattcctctgccctcggggccccttccccaaaaccagaggaatttctggcctagggtatattggcaattaaatattggttcaaaaccagaagc

SEQ ID NO: 19068 - RNA, 170 nt, unidentified
  source 1..170: mol_type = other RNA; note = Related to NZ_LSNE01000017.1; note = Paraglaciecola hydrolytica
gcttctgaaagaaatatgggtggtgtatcaccacctggaagattaaggtccagcacaaaagtatcccctaggccagaagttcctctgtccctggggccccttccccaaaaccagaggaacttctggcctagggtatatcagcaattaggtattggttcaaaaacggaagc

SEQ ID NO: 19069 - RNA, 170 nt, Vibrio parahaemolyticus
  source 1..170: mol_type = other RNA; note = Related to NZ_MISS01000101.1
tctcctgaacagaaaatggatggtgtaccaccatcttctatgtttaggttatctttaaaagatgctccgaggccagaagaatctctgtcctcggggcccctaccccaaagccagagattcttctggcctcgggtctcagagcaattacaaattggttctaattcagggga

SEQ ID NO: 19070 - RNA, 170 nt, Vibrio sp.
  source 1..170: mol_type = other RNA; note = Related to VIVA01000006.1; note = Vibrio crassostreae
ttccctgtgcaagaaatggttggtgtatcaccatccgaaacgcaaaggttatctttaaaagcagctccgaggccagaagaatctctgtccccggggcccctaccccaaaaccagagattcttctggcctcgggtctcagagcaattaaaaattggttctacttcaggaaa

SEQ ID NO: 19071 - RNA, 170 nt, Vibrio parahaemolyticus
  source 1..170: mol_type = other RNA; note = Related to JACBTA010000009.1
cttttcgaacagaatttggatggtgattcgccatctcctatgttcaggtcaacatcaaaagtagctccgaggccagaagaatctctgtccccggggcccctaccccaaaaccagagattcttctggcctcgggtctcagagcaattgaaaattggttctttctcggaagg

SEQ ID NO: 19072 - RNA, 170 nt, Aeromonas sp.
  source 1..170: mol_type = other RNA; note = Related to CP038441.1; note = Aeromonas media
tcgccgacagggaatctggctggtgcagcaccagttgttaggaacagttcggctttaaaagcagctccgcggccagaagtttctctagcctcggggccccttccccaaaaccagagaaacttctggccgcgggtctctgagcaatttaatattggtcttattgtcggtga

SEQ ID NO: 19073 - RNA, 152 nt, unidentified
  source 1..152: mol_type = other RNA; note = Related to JAJSLX010000004.1; note = Marinibactrum sp.
gtgctagatcagaatttggatgatgcttcgtcatcctctagtataggacttaaatatcaagatgcacagcggtcaaatagctttttggccgctgaccaaaaagctatttggccgctggtctcagagcaatttcagattggttctactagcgc

SEQ ID NO: 19074 - RNA, 170 nt, unidentified
  source 1..170: mol_type = other RNA; note = Related to QBMB01000082.1; note = Burkholderiales bacterium
gctgaggaaccagagaaggctgatgattcgtcagccgtagcaattgattcagcaacacaaggggagcggccaaaaggcgcggccgccaatcctcgcgcagctccgggtgtcggccgcgccttttggccgctcctctctaagcaactttttgttggctcttcccctcaagc

SEQ ID NO: 19075 - RNA, 170 nt, unidentified
  source 1..170: mol_type = other RNA; note = Related to NZ_SCML01000017.1; note = Hydrogenophaga sp.
gctgaggaaccagagaaggctgatgtttcgtcagccgtatttattgactcagcgacacaagaggagcggccaaaaggcgcggccgccaatcctcgcgtagctccgggtgccggccgcgccttttggccgctcctagctaagcaactttttgttggctcttccccttcagc

SEQ ID NO: 19076 - RNA, 167 nt, unidentified
  source 1..167: mol_type = other RNA; note = Related to JAFLDL010000015.1; note = Candidatus Accumulibacter sp.
gtttggggtatcgagcaggctgatgattcgtcggccgtatcccatggaatggcagtgcaagaggacgagcggccaataggcgcggccgtctctcctcgtaggagagacggccgcgcctattggccgctcctctcaaagcagcttttagttggctcttcttccccctc

SEQ ID NO: 19077 - RNA, 173 nt, unidentified
  source 1..173: mol_type = other RNA; note = Related to PBZA01000066.1; note = Sutterellaceae bacterium
gttcaggaaacagagaaggctgatgcatcgtcagccgtagtgattgaaccagtattacaagaggataagcggccaatatccccggccgtccctcctcgcccagctcggagttccggccgtggatattggccgctcctctcaaagcaactttttgttggctcttctaccctgac

SEQ ID NO: 19078 - RNA, 173 nt, Pseudomonas sp.
  source 1..173: mol_type = other RNA; note = Related to NZ_AJXE01000028.1; note = Pseudomonas stutzeri
gccggtgaaccagagaaggctgatgtttcgtcagccgtaattgttgaccaaccagtacaagaggatgagcggccaacaggcgcggcccgccctcctcgcgtagctcgtcgtgcggcccgcgcctgttggccgctcctcgcaaagcaactttttgttggctcttcctcccgcgc

SEQ ID NO: 19079 - RNA, 173 nt, Pseudomonas sp.
  source 1..173: mol_type = other RNA; note = Related to JAAQXA010000034.1
gccggtgaaccagagaaggctgatgtttcgtcagccgtaattgttgacccaccactacaagaggatgagcggccaacaggcgcggcccgccctcctcgcgtagctcgtcgagcgggccgcgcctgttggccgcccctcggtaagcaactttttgttggctcttcctcccgcgc

SEQ ID NO: 19080 - RNA, 173 nt, Pseudomonas sp.
  source 1..173: mol_type = other RNA; note = Related to NZ_WTFT01000007.1; note = Pseudomonas izuensis
gccggtgaatcagagaaggctgatgtttcgtcagccgtaattgttgaccaaccactacaagaggatgagcggccaacaggcgcggtctgccctcctcgcgtagctcgtcgagcagaccgcgcctgttggccgcttctcgcaaagcaactttttgttggctcttcctcccgcgc

SEQ ID NO: 19081 - RNA, 165 nt, unidentified
  source 1..165: mol_type = other RNA; note = Related to DNJA01000297.1; note = Deltaproteobacteria bacterium
agattagtggttagtaacgactctaataggttggcgcttcgccatcctttcgtgcattcttgaaaagaaaggtgcgcgggaaagccggtcggctcccgcgcgccgccgggtccgcccggctttcccgcgcagcatctacgtaaggaaacgaattccttagccatg

SEQ ID NO: 19082 - RNA, 195 nt, unidentified
  source 1..195: mol_type = other RNA; note = Related to NC_016631.1; note = Granulicella mallensis
agacaggtggcgtggttgtttcactttggttgatgtttcgtcaaccgatgtagcaatcaggtaattcatacaagggttgtcaacacgacgacttgcaaaagacaaaaccgcaactcgtcgtgttgacaacacagtcgagcagtgtcaacacactggaatccgaagtgatcacgccgcttgtctctttcacatctt

SEQ ID NO: 19083 - RNA, 187 nt, unidentified
  source 1..187: mol_type = other RNA; note = Related to CP011392.1; note = Dehalogenimonas sp.
agcaaggggagcacgaattatgattgggcgtcgtttcgtcgcccatgtgacaaggctctccataaaatatctcctatttcgagaaataggagatttgcgactcgtcctccgtttgttactacggagcgagcggcaattcacaaggattggacaacatgaatagtctccccttgctggtctccttaga

SEQ ID NO: 19084 - RNA, 153 nt, unidentified
  source 1..153: mol_type = other RNA; note = Related to JACPQM010000002.1; note = Chloroflexi bacterium
ggcaggggagactagtggcctgggcgatgcttcgtcgcccgtggtgcaagactccccgtagaagatcctgcgagctacccgctcgcagtctctccaagcaatcaaagtgagattggaataacggaccatgaaccccctgcccctccttgtgtc

SEQ ID NO: 19085 - RNA, 209 nt, unidentified
  source 1..209: mol_type = other RNA; note = Related to QFWV02000004.1; note = Oceaniradius stylonematis
tgcgagttggtatcgcgttcagcttgttcgttgtttcggcgagccgttgttcaggtttggtttgaaggggctcgtggcctaggtcgaagaggncgttttgccggaccttgccgccaaaacgcctcttcgacctaggccacgcgctcaaggcagtcttcacttcaaagactggaagttgctgtagatgccaactcgctcctactacttcc

SEQ ID NO: 19086 - RNA, 208 nt, unidentified
  source 1..208: mol_type = other RNA; note = Related to JAGRMS010000295.1; note = Pseudooceanicola sp.
agcgagttggtatcgcgttcagcttgctcgctgcttcggcgagccgttgttcaggttcggtttgaagaggctcgcggcctgagtccaagaggcattttgcccaaggtctcggccaaaatgcctcttggactcaggccgcgcgctcaaggcagtcttcacttcagagactggaagttgctgtagatgccaactcgctcatattacttcc

SEQ ID NO: 19087 - RNA, 208 nt, unidentified
  source 1..208: mol_type = other RNA; note = Related to JAAZTG010000053.1; note = Rhodobacteraceae bacterium R_SAG4
tgcgagttggtatcgcgttcagcttgttcgctgtttcggcgagccgttgttcaggtttggtttgaaggggctcgtggcctaggtcgaagaggcattttgccggaccttgccgccaaaatgcctcttcgacctaggccacgcgctcaaggcagtcttcgtttcaaagactggaagttgctgtagatgccaactcgctcatactacttcc

SEQ ID NO: 19088 - RNA, 208 nt, unidentified
  source 1..208: mol_type = other RNA; note = Related to NZ_QDFI01000072.1; note = Phycocomes zhengii
tgcgagttggtatcgcgttcagcttgttcgctgcttcggcgagccgttgttcaggtttggtttgaaggggctcgcggcctaagtccaagaggcattttgcccaaggtctcggccaaaatgcctcttggacttaggccgcgcgctcaaggcagtcttcgcttcagagactggaagttgctgtagatgccaactcgctcatactacttcc

SEQ ID NO: 19089 - RNA, 208 nt, unidentified
  source 1..208: mol_type = other RNA; note = Related to NZ_JAEG01000002.1; note = Ciceribacter selenitireducens
agcgagttggtatcgcgttcagcttgttcgctgtttcggcgagccggtgttcaggttcggtttgaagttgctcacggcctagatcgaagaggcattttgcctcaggtcttcgccaaaattcctcttcgacctaggccgcgcgctcaaagcagtcttacattcagagactggaagttgctgtagatgccaactcgctcatattactttc

SEQ ID NO: 19090 - RNA, 208 nt, unidentified
  source 1..208: mol_type = other RNA; note = Related to JACFOS010000001.1; note = Bartonella sp.
cgcgagttggcatcatgttcagtttgttcgctgtttcggcgagctgacaatcaggttaggcttgaaagggctcgcggaataggctcgagaggcattatgccgggccttgccgccaaaattcctctcaagcctattccgcgtgctcatggcagtctcatttatcaaggctggaagttactgtagatgccaactcgttcctattattttc

SEQ ID NO: 19091 - RNA, 209 nt, unidentified
  source 1..209: mol_type = other RNA; note = Related to PCOI01000001.1; note = Ochrobactrum sp.
cgcgagttggcatcgcacccagcttgttcgctgtttcggcgagcagttcgtcaggttaggtttatagaggctagcggctttggttcgagaggcattttgccggatccgaccgccaaaatccctctcgaaccaaagccgcccgctctaggcagtcttaatattagagactggatcatgctgtaagatgccaactcgctcctactttttcc

SEQ ID NO: 19092 - RNA, 208 nt, unidentified
  source 1..208: mol_type = other RNA; note = Related to NZ_AYPY01000034.1; note = Rhodobacter capsulatus
ggcgagttggcgttgcgttcagcttgttcgctgtttcggcgagcagtttttcaggtttggtttgaaggtgctcgcggcctaggttcgagaggcattttgccggaccttgccgccaaaatgcctctcgaacctaggccgcgcgctcaaggcagtcctcactcttcggactggaagttgctgtaaatgccaactcgctcctattacttcc

SEQ ID NO: 19093 - RNA, 208 nt, unidentified
  source 1..208: mol_type = other RNA; note = Related to NZ_LPZR01000055.1; note = Tistrella mobilis
cgcgagttggtgtcacgtacagcttgttcgctgtttcggcgagctgttgttcaggttcagtatgaagaagctcgtggcctaggttgaagaggcaccttgccggacctagccgccaatgcgcctcttcaacctagtccacgcgctcaaggcagtcttatctttagagactggaagttgctgtagatgccaactcgctcatattattttc

SEQ ID NO: 19094 - RNA, 208 nt, unidentified
  source 1..208: mol_type = other RNA; note = Related to JAAMCC010000006.1; note = Agrobacterium tumefaciens
ggcgagttggtatcgctttcagcttgttcgctgtttcggcgagccggtgatcaggtttggtttgaagaggctcgtggtctaagtccgagaggcaatttgccgaaggctttcgccaaatcgcctctcggacttagaccacgtgctcaaggcagtctcgaatatatagactggaaattgctgtagatgccaactcgctcctactatttcc

SEQ ID NO: 19095 - RNA, 203 nt, unidentified
  source 1..203: mol_type = other RNA; note = Related to NZ_CP045420.1; note = Maribius sp.
tgcgggttggcatttaattcggcttgttcgctgtttcggcgagcggaacttcaggttagggttgtaaggtcacgcggatcgggaagaaggctctgtttgccggaccccgccgccaaacagagccttcttcccgatccgcgtgcattaggcagtcataaagactggaactgctgaactcatgccaacccgctcctactatttcc

SEQ ID NO: 19096 - RNA, 200 nt, unidentified
  source 1..200: mol_type = other RNA; note = Related to QKMF01000007.1; note = Pelagimonas varians
ggcgggttggctgcaaaatcagattgttcgccgttgcggcgagcaggtaaacaggtcaactatataagggctcgtggattgaaaggaagctccggatttccggatctttccggagatccggagcttcctttcaatccacatgctcaaggcagtcttctggactggaatttctgagatgccaacccgctcctattttttcc

SEQ ID NO: 19097 - RNA, 194 nt, unidentified
  source 1..194: mol_type = other RNA; note = Related to VHLH01000001.1; note = Pararhizobium sp.
cgcgggatggcagaattttcgcataggttgctgtttcggcatcctggttttgtggtttggtttataagggctcgcgtttgggggaactcggcaaatttgccgacgagcgccaaattcgccgagttcccccaaacgcgcgcttaagcagtcgtattgactggtatttgcgatgccatcccgcagcttttttctac

SEQ ID NO: 19098 - RNA, 202 nt, unidentified
  source 1..202: mol_type = other RNA; note = Related to VZUL01000002.1; note = Neorhizobium galegae
cgcgaggcggtatcggataggaggctgtaccagctgtcctgccatacaggtcaaataatgtaatcgagcgtgtggttagtaaggatcggtcgccaatcggctgaattctcacccaatcaccgaccgatccttactaaccacacattcaaagcaatcttttgaagattggtttttccaatgccgcctcgctcctactacaatg

SEQ ID NO: 19099 - RNA, 200 nt, unidentified
  source 1..200: mol_type = other RNA; note = Related to JACHXX010000002.1; note = Rhizobium laguerreae
cgcgaggtggttttggataggaggctgcaccagccgtcctgccattcaggtcaaatagtataagtgggcgcgtgattagtaagggccggtcggcaatcgcctgaagcctcagccaatcaccgaccggcccttactaatcacgcattcaaagcaatcccttgagattggtttttccatgccacctcgcagctactacaacg

SEQ ID NO: 19100 - RNA, 201 nt, unidentified
  source 1..201: mol_type = other RNA; note = Related to CP061772.1; note = Ochrobactrum sp.
cgcgaggcggcaacggataggaggctgtaccagctgtcctgccatacaggtaaaatatagtaagacccgcgtgattagtaaggctcggtcggcaatcggctgaactttcacccaatcaccgaccgatccttactaatcacgcattcaaagcaatctttctagagattggtgcttccatgccgcctcgctcctattacaatt

SEQ ID NO: 19101 - RNA, 202 nt, unidentified
  source 1..202: mol_type = other RNA; note = Related to JABBGK010000003.1; note = Rhizobium sp.
cgcgaggcggtatcggatagggggctgcaccagccttcctgccattcaggtcaaatagtataaggatcgcgtgagaagtaaggatcggtcagcgattggctgagccttcacccaaccactgaccgatccttacttctcacgcattcaaagcaatcttcttggagattggtttttcccatgccgcctcgctcctactacaaag

SEQ ID NO: 19102 - RNA, 203 nt, unidentified
  source 1..203: mol_type = other RNA; note = Related to WBWH01000007.1; note = Brucella intermedia
cgcgaggcggtatcggatagggggctgcaccagccttcctgcctatcaggttaaatattgtaaggatcgcgtgagaagtaaggatcagtcagtgattggctgaaccttcacccaatcactgactgatccttacttctcacgcattcaaagcaatctttttggagattggttttttcctatgccgcctcgctcctattatgtag

SEQ ID NO: 19103 - RNA, 200 nt, unidentified
  source 1..200: mol_type = other RNA; note = Related to VFUS01000001.1; note = Mesorhizobium sp.
cgcggggcggcactagataggacactgaatcagtgtcctggctttcaggtcttgcgtgtaaaaaggcgtgctttgtaagagccgctcgagaatggctgcattgcagccacgagcggagttctcgagcgcctcttacaaagcacgcactaagcaatctcaggattggtgttgtcgaatgccgccccgttcttactataatt

SEQ ID NO: 19104 - RNA, 200 nt, unidentified
  source 1..200: mol_type = other RNA; note = Related to JAIUGX010000003.1; note = Mesorhizobium sp.
tgcggggcggcatggataggacgctgcatcagcgtcctggttttcaggtcttgcgtgtaaaaggcgcgctttgtaagagccgctcgagaatggctgcatagcagccacgagcggagttctcgagcgcctcttacaaagcacgcactaagcaatctctaggattggtttttgtctaatgccgccccgctcctactacaatt

SEQ ID NO: 19105 - RNA, 191 nt, unidentified
  source 1..191: mol_type = other RNA; note = Related to NZ_CP049037.1; note = Pseudohalocynthiibacter aestuariivivens
ggcgaggtggcttggatagggcactgcatcagcgtacctgcccttcaggtcacgctcataagggggtgtggctcatcggagccgctcttgctctgggtaagctttacccaaatcaagatcgcctccgatgagccacacttttaagcaatctaggattggctaaaccatgccacctcgctcctactacattg

SEQ ID NO: 19106 - RNA, 195 nt, unidentified
  source 1..195: mol_type = other RNA; note = Related to DQCL01000311.1; note = Octadecabacter sp.
tgcggggtggcttggatagagcgctgcaacagcggctctgcctttcaggtctcccatgtaaggacgtgtgatttgcaagagccggatgcgctttggctggctcccacccaaatcgcatccgtctcttgcaaatcacactttgaagcaatcggtacgagattggccaaaccatgccgccccgctcctactatcttg

SEQ ID NO: 19107 - RNA, 188 nt, unidentified
  source 1..188: mol_type = other RNA; note = Related to NZ_CP080493.1; note = Pseudochrobactrum sp.
gacgaggcggtaatttggaggctgtagcagtcttccgggtgtttaggctcaattttgtaagagatcgtgattagtaagagaagaagggcatcgcctgactctcagacaatccccttcttctcttactaatcacgctcttaaagcaatctatgattggtgaaatatgccgcctcgttcttattatcatt

SEQ ID NO: 19108 - RNA, 189 nt, unidentified
  source 1..189: mol_type = other RNA; note = Related to NZ_QDKO01000009.1; note = Caulobacter sp.
gtcggggcggcactcacgattggccgctgaagcagcagccataggttttcttggttgggcgtaaagggctcgcggttaggcttctgtcgcgctttcgggcgcagccaaaaccgcgacagaagcctaaccgcgtgctcttaagcaactaatttggttggtaaaacgtgtcgccccgcacctacgacctca

SEQ ID NO: 19109 - RNA, 20 nt, synthetic construct
  source 1..20: mol_type = other RNA
gagtccgagcagaagaagaa

SEQ ID NO: 19110 - RNA, 277 nt, synthetic construct
  source 1..277: mol_type = other RNA
tgataagattccgtatgcgcacccttagcgagaggtttatcattaaggtcaacctctggatgttgtttcggcatcctgcattgaatctgagttactgtctgttttcctacaaacggcagaagctggaggaggaagggcctgagtccgagcagaagaaaaagttctcccatcacatcaaccggtggcgcattgccacgaagcaggccaatggggaggacatcgatgtcaaggaaacccgtttcttctgacgtaagggtgcgcatacggaatcttatca

SEQ ID NO: 19111 - RNA, 268 nt, synthetic construct
  source 1..268: mol_type = other RNA
ccgtagtgggagcctcaggcgagggtgtgtatcatgcccgttctgccaagacccaccaaagaagggcaccgtggaggacaaacggcagaagctggaggaggaagggcctgagtccgagcagaagaaacagaagtgcaaagttctcccatcacatcaaccggtggcgcattgccacgaagcaggccaatggggaggacatcgatgtcacctccacggtgcaatgcgaaagcaacttgaggctttgcttagtatgaggctcccactacgg

SEQ ID NO: 19112 - protein, 340 aa, synthetic construct; identical to SEQ ID NO: 2042

SEQ ID NO: 19113 - RNA, 343 nt, synthetic construct
  source 1..343: mol_type = other RNA
gttaaggtggttatattctagtatttatgaagtgtagtcgcttcgatcgttaaggctgattttaacctctgcataataatatcggtagatattattatgcacgctccctttagcagagctaagaatcgctcactcaggcacaagctttgaggacaaacggcagaagctggaggaggaagggcctgagtccgagcagaagaatcctaagagaaaagttctcccatcacatcaaccggtggcgcattgccacgaagcaggccaatggggaggacatcgatgtcacctcaaagcttgtgcctgagtgagagctaaagaaaagaaaagtagaataagccaccttaac

SEQ ID NO: 19114 - protein, 671 aa, synthetic construct; identical to SEQ ID NO: 6083

SEQ ID NO: 19115 - RNA, 338 nt, synthetic construct
  source 1..338: mol_type = other RNA
gctccggagcaatgagcaggctcttgcaatccgggcggtgtttcgccgcccttgtgaactgccgtttcatgcaccacgggcgccgttttcactgtgccaccccagccacggtagtgctacaaacggcagaagctggaggaggaagggcctgagtccgagcagaagaactacaaggttaaagttctcccatcacatcaaccggtggcgcattgccacgaagcaggccaatggggaggacatcgatgtcaagcactaccgtggcggggtggcgtcgagcgaacagctcccgtcccgtgagccctacaggctcttcgacgagatgcacattgctccggagc

SEQ ID NO: 19116 - protein, 499 aa, synthetic construct; identical to SEQ ID NO: 6943

SEQ ID NO: 19117 - RNA, 319 nt, synthetic construct
  source 1..319: mol_type = other RNA
gcggagtgctggcctcaactgatacagagaatatgggcggtgattcgccgtctttacagttaaggcacaatttaaaagaggttccgcacccaagcctgtcttgggctgcacaaacggcagaagctggaggaggaagggcctgagtccgagcagaagaacgtatggcctaaagttctcccatcacatcaaccggtggcgcattgccacgaagcaggccaatggggaggacatcgatgtcagcagcccaagacaggcttgggtgcggatctacgagcaattaaatattggttcgatgtccagtgatgaggccagcacccgc

SEQ ID NO: 19118 - RNA, 987 nt, synthetic construct
  source 1..987: mol_type = other RNA
atgaaatctgcagagtatctgaatacgttccgccttaggaatttgggcctccccgtgatgaacaatctccacgatatgagcaaggcgactcgaatatccgtggaaacgctgagactgctcatctatacagcagactttcggtacaggatctacacggtcgaaaagaaggggcctgagaaacgcatgcgaacaatttatcaacctagccgagagctcaaggcgttgcagggctgggttcttcgaaacatccttgacaaactctcatcatcaccctttagtattgggtttgaaaagcaccaaagcatccttaacaacgcgacgccacacataggtgccaatttcatattgaacatcgacttggaggatttttttccgagcctcacagccaataaagtgttcggtgtttttcacagtcttgggtacaatcgccttattagttccgttcttaccaagatttgttgttacaagaatctcttgccccagggagcacccagcagtccgaaattggcgaatttgatttgttccaagctcgattatcgaatacaagggtacgcgggcagccggggactcatctatacccgctacgcagacgatcttacgctgtctgcccaatcaatgaagaaggtcgtaaaggcgcgggatttcttgttttctatcatcccgtccgagggcttggtaattaattccaaaaagacttgtatctcaggaccacgatctcagcgaaaagtgacaggactcgtcatttctcaagaaaaagtcggtatagggagagagaagtataaggaaatccgcgcgaagatccaccacatattctgtggcaagagcagcgagatagaacacgtccgaggctggttgtccttcatactgagcgtggactcaaaaagccaccgccggttgatcacctatatttcaaaactggaaaagaaatatggaaagaacccactcaacaaagctaaaacaccaccaaagaagaaaagaaaggtctga

SEQ ID NO: 19119 - RNA, 399 nt, synthetic construct
  source 1..399: mol_type = other RNA
gaaatgataagattccgtatgcgcacccttagcgagaggtttatcattaaggtcaacctctggatgttgtttcggcatcctgcattgaatctgagttactgtctgttttcctacaaacggcagaagctggaggaggaagggcctgagtccgagcagaagaaaaagttctcccatcacatcaaccggtggcgcattgccacgaagcaggccaatggggaggacatcgatgtcaaggaaacccgtttcttctgacgtaagggtgcgcatacggaatcttatcagagtccgagcagaagaagaagtttcagagctatgctggaaacagcatagcaagttgaaataaggctagtccgttatcaacttgaaaaagtggcaccgagtcggtgctttttttttttt

SEQ ID NO: 19120 - RNA, 975 nt, synthetic construct
  source 1..975: mol_type = other RNA
atgcgcatttactctctgatcgacagccaaaccttaatgaccaaagggttcgcatccgaggtcatgaggagcccagaaccccctaagaagtgggacattgcgaagaagaagggcggaatgcgtacgatataccatccctcttctaaggtgaagctgatacagtactggctgatgaacaacgtgttctccaaattgccgatgcacaacgccgcgtacgctttcgtgaagaatagatctatcaagtctaacgcactgctgcacgcagagagtaagaacaaatactacgttaagattgacctgaaggacttctttccaagcatcaagttcacagacttcgaatatgcctttacccggtaccgtgacagaatagagttcacgaccgagtacgacaaagaactgcttcagctgattaagaccatttgtttcatttctgactctacactgccaataggcttccccacttcccctcttatagccaatttcgtcgccagggagctggacgagaagctcactcagaagctgaacgctatagacaagctcaacgctacgtacactcgctacgcagacgacataatcgtgagcacgaacatgaagggcgcctctaagctgatcttagactgcttcaagcggaccatgaaggaaatcggacccgatttcaagatcaatatcaagaagttcaaaatatgctctgccagtggcggctcaattgtcgtgacgggccttaaggtctgtcatgacttccacataactctgcaccggtctatgaaggacaagatccgcctgcacctctctctcctgtccaaaggtattctgaaggacgaggaccacaacaagctgtccgggtacatcgcctacgctaaggacatcgatccacacttctacaccaagctcaataggaagtacttccaggagatcaagtggatacaaaacctgcataataaggtggagccaccaaagaagaaaagaaaggtctga

SEQ ID NO: 19121 - RNA, 418 nt, synthetic construct
  source 1..418: mol_type = other RNA
gaaatgataagattccgtaagagccaaacctagcattttatgggttaatagcccatcgggccatgagtcatggtttcgcctagtattttagctatgcccgtcgttcagttcgctgaacaaacggcagaagctggaggaggaagggcctgagtccgagcagaagaattacgtctgcaaagttctcccatcacatcaaccggtggcgcattgccacgaagcaggccaatggggaggacatcgatgtcatcagcgaactgatcgacgtgctcaagtaggtttggctcttacggaatcttatcagagtccgagcagaagaagaagtttcagagctatgctggaaacagcatagcaagttgaaataaggctagtccgttatcaacttgaaaaagtggcaccgagtcggtgctttttttttttt

SEQ ID NO: 19122 - RNA, 984 nt, synthetic construct
  source 1..984: mol_type = other RNA
atggacgctaccagaacgactctccttgcattggatctcttcggatctccaggttggtccgccgataaagaaattcagaggcttcatgcgctcagtaatcatgctggaaggcattacagaaggattatattaagtaaaaggcacggcggacagcgtcttgtgcttgcacctgattacttgttaaagaccgttcagcgcaacattttgaagaacgttttgagtcaatttccactgtcaccatttgctacagcctacagaccgggatgcccaatcgtgtctaacgcgcagccacactgccaacagccacagatcttgaaactcgatatagaaaacttcttcgattctattagttggttgcaggtgtggcgggtgtttcgccaggcccagttgccccgaaatgtcgtaacgatgctcacttggatatgttgttataacgacgcacttccgcagggtgcccctacatcccctgcaatttccaatctcgtcatgagaaggtttgatgaacggattggagaatggtgtcaggctcgagggattacctacactcgctactgcgatgacatgacgtttagtggacacttcaatgcaaggcaggtcaagaataaagtctgcggtctcttagctgagctgggcctttccctgaataaacggaaaggctgcctcatagcggcttgtaagcgccagcaagtcaccggcattgttgtgaatcacaagccacagcttgcccgagaagccaggcgtgccctgcgtcaggaagtgcacctgtgccagaaatatggagttatctctcatctctcacatagaggtgaactggatcctagcggagatctgcacgctcaggcgacagcgtatctctatgcactccaggggagaattaactggcttcttcaaattaaccctgaggatgaggcgtttcaacaggcccgggagtccgttaagaggatgttagttgcctggccaccaaagaagaaaagaaaggtctga

SEQ ID NO: 19123 - RNA, 437 nt, synthetic construct
  source 1..437: mol_type = other RNA
gaaatgataagattccgtacgccagcagtggcaatagcgtttccggccttttgtgccgggagggtcggcgagtcgctgacttaacgccagtagtatgtccatatacccaaagtcgcttcattgtaacaaacggcagaagctggaggaggaagggcctgagtccgagcagaagaatccttcgagcaaagttctcccatcacatcaaccggtggcgcattgccacgaagcaggccaatggggaggacatcgatgtcatacagttacgcgccttcgggatggtttaatggtattgccgctgttggcgtacggaatcttatcagagtccgagcagaagaagaagtttcagagctatgctggaaacagcatagcaagttgaaataaggctagtccgttatcaacttgaaaaagtggcaccgagtcggtgctttttttttttt

SEQ ID NO: 19124 - RNA, 111 nt, synthetic construct
  source 1..111: mol_type = other RNA
gagtccgagcagaagaagaagtttcagagctatgctggaaacagcatagcaagttgaaataaggctagtccgttatcaacttgaaaaagtggcaccgagtcggtgcttttt

SEQ ID NO: 19125 - RNA, 111 nt, synthetic construct; identical to SEQ ID NO: 19124
  source 1..111: mol_type = other RNA

SEQ ID NO: 19126 - RNA, 987 nt, synthetic construct; identical to SEQ ID NO: 19118
  source 1..987: mol_type = other RNA

SEQ ID NO: 19127 - RNA, 399 nt, synthetic construct; identical to SEQ ID NO: 19119
  source 1..399: mol_type = other RNA

SEQ ID NO: 19128 - RNA, 975 nt, synthetic construct; identical to SEQ ID NO: 19120
  source 1..975: mol_type = other RNA

SEQ ID NO: 19129 - RNA, 418 nt, synthetic construct; identical to SEQ ID NO: 19121
  source 1..418: mol_type = other RNA

SEQ ID NO: 19130 - RNA, 984 nt, synthetic construct; identical to SEQ ID NO: 19122
  source 1..984: mol_type = other RNA

SEQ ID NO: 19131 - RNA, 437 nt, synthetic construct; identical to SEQ ID NO: 19123
  source 1..437: mol_type = other RNA

SEQ ID NO: 19132 - RNA, 4506 nt, synthetic construct
  source 1..4506: mol_type = other RNA
gggtcccgcagtcggcgtccagcggctctgcttgttcgtgtgtgtgtcgttgcaggccttattcggatccgccaccatggacaagaagtacagcatcggactggacatcggaacaaacagcgtcggatgggcagtcatcacagacgaatacaaggtcccgagcaagaagttcaaggtcctgggaaacacagacagacacagcatcaagaagaacctgatcggagcactgctgttcgacagcggagaaacagcagaagcaacaagactgaagagaacagcaagaagaagatacacaagaagaaagaacagaatctgctacctgcaggaaatcttcagcaacgaaatggcaaaggtcgacgacagcttcttccacagactggaagaaagcttcctggtcgaagaagacaagaagcacgaaagacacccgatcttcggaaacatcgtcgacgaagtcgcataccacgaaaagtacccgacaatctaccacctgagaaagaagctggtcgacagcacagacaaggcagacctgagactgatctacctggcactggcacacatgatcaagttcagaggacacttcctgatcgaaggagacctgaacccggacaacagcgacgtcgacaagctgttcatccagctggtccagacatacaaccagctgttcgaagaaaacccgatcaacgcaagcggagtcgacgcaaaggcaatcctgagcgcaagactgagcaagagcagaagactggaaaacctgatcgcacagctgccgggagaaaagaagaacggactgttcggaaacctgatcgcactgagcctgggactgacaccgaacttcaagagcaacttcgacctggcagaagacgcaaagctgcagctgagcaaggacacatacgacgacgacctggacaacctgctggcacagatcggagaccagtacgcagacctgttcctggcagcaaagaacctgagcgacgcaatcctgctgagcgacatcctgagagtcaacacagaaatcacaaaggcaccgctgagcgcaagcatgatcaagagatacgacgaacaccaccaggacctgacactgctgaaggcactggtcagacagcagctgccggaaaagtacaaggaaatcttcttcgaccagagcaagaacggatacgcaggatacatcgacggaggagcaagccaggaagaattctacaagttcatcaagccgatcctggaaaagatggacggaacagaagaactgctggtcaagctgaacagagaagacctgctgagaaagcagagaacattcgacaacggaagcatcccgcaccagatccacctgggagaactgcacgcaatcctgagaagacaggaagacttctacccgttcctgaaggacaacagagaaaagatcgaaaagatcctgacattcagaatcccgtactacgtcggaccgctggcaagaggaaacagcagattcgcatggatgacaagaaagagcgaagaaacaatcacaccgtggaacttcgaagaagtcgtcgacaagggagcaagcgcacagagcttcatcgaaagaatgacaaacttcgacaagaacctgccgaacgaaaaggtcctgccgaagcacagcctgctgtacgaatacttcacagtctacaacgaactgacaaaggtcaagtacgtcacagaaggaatgagaaagccggcattcctgagcggagaacagaagaaggcaatcgtcgacctgctgttcaagacaaacagaaaggtcacagtcaagcagctgaaggaagactacttcaagaagatcgaatgcttcgacagcgtcgaaatcagcggagtcgaagacagattcaacgcaagcctgggaacataccacgacctgctgaagatcatcaaggacaaggacttcctggacaacgaagaaaacgaagacatcctggaagacatcgtcctgacactgacactgttcgaagacagagaaatgatcgaagaaagactgaagacatacgcacacctgttcgacgacaaggtcatgaagcagctgaagagaagaagatacacaggatggggaagactgagcagaaagctgatcaacggaatcagagacaagcagagcggaaagacaatcctggacttcctgaagagcgacggattcgcaaacagaaacttcatgcagctgatccacgacgacagcctgacattcaaggaagacatccagaaggcacaggtcagcggacagggagacagcctgcacgaacacatcgcaaacctggcaggaagcccggcaatcaagaagggaatcctgcagacagtcaaggtcgtcgacgaactggtcaaggtcatgggaagacacaagccggaaaacatcgtcatcgaaatggcaagagaaaaccagacaacacagaagggacagaagaacagcagagaaagaatgaagagaatcgaagaaggaatcaaggaactgggaagccagatcctgaaggaacacccggtcgaaaacacacagctgcagaacgaaaagctgtacctgtactacctgcagaacggaagagacatgtacgtcgaccaggaactggacatcaacagactgagcgactacgacgtcgaccacatcgtcccgcagagcttcctgaaggacgacagcatcgacaacaaggtcctgacaagaagcgacaagaacagaggaaagagcgacaacgtcccgagcgaagaagtcgtcaagaagatgaagaactactggagacagctgctgaacgcaaagctgatcacacagagaaagttcgacaacctgacaaaggcagagagaggaggactgagcgaactggacaaggcaggattcatcaagagacagctggtcgaaacaagacagatcacaaagcacgtcgcacagatcctggacagcagaatgaacacaaagtacgacgaaaacgacaagctgatcagagaagtcaaggtcatcacactgaagagcaagctggtcagcgacttcagaaaggacttccagttctacaaggtcagagaaatcaacaactaccaccacgcacacgacgcatacctgaacgcagtcgtcggaacagcactgatcaagaagtacccgaagctggaaagcgaattcgtctacggagactacaaggtctacgacgtcagaaagatgatcgcaaagagcgaacaggaaatcggaaaggcaacagcaaagtacttcttctacagcaacatcatgaacttcttcaagacagaaatcacactggcaaacggagaaatcagaaagagaccgctgatcgaaacaaacggagaaacaggagaaatcgtctgggacaagggaagagacttcgcaacagtcagaaaggtcctgagcatgccgcaggtcaacatcgtcaagaagacagaagtccagacaggaggattcagcaaggaaagcatcctgccgaagagaaacagcgacaagctgatcgcaagaaagaaggactgggacccgaagaagtacggaggattcgacagcccgacagtcgcatacagcgtcctggtcgtcgcaaaggtcgaaaagggaaagagcaagaagctgaagagcgtcaaggaactgctgggaatcacaatcatggaaagaagcagcttcgaaaagaacccgatcgacttcctggaagcaaagggatacaaggaagtcaagaaggacctgatcatcaagctgccgaagtacagcctgttcgaactggaaaacggaagaaagagaatgctggcaagcgcaggagaactgcagaagggaaacgaactggcactgccgagcaagtacgtcaacttcctgtacctggcaagccactacgaaaagctgaagggaagcccggaagacaacgaacagaagcagctgttcgtcgaacagcacaagcactacctggacgaaatcatcgaacagatcagcgaattcagcaagagagtcatcctggcagacgcaaacctggacaaggtcctgagcgcatacaacaagcacagagacaagccgatcagagaacaggcagaaaacatcatccacctgttcacactgacaaacctgggagcaccggcagcattcaagtacttcgacacaacaatcgacagaaagagatacacaagcacaaaggaagtcctggacgcaacactgatccaccagagcatcacaggactgtacgaaacaagaatcgacctgagccagctgggaggagacggaggaggaagcccgaagaagaagagaaaggtctagctagccatcacatttaaaagcatctcagcctaccatgagaataagagaaagaaaatgaagatcaatagcttattcatctctttttctttttcgttggtgtaaagccaacaccctgtctaaaaaacataaatttctttaatcattttgcctcttttctctgtgcttcaattaataaaaaatggaaagaacctcgagaaaaaaaaaaaaaaaaaaaaaaaaaaaaaaaaaaaaaaaaaaaaaaaaaaaaaaaaaaaaaaaaaaaaaaaaaaaaaaaaaaaaaaaaaatctag

SEQ ID NO: 19133 - RNA, 111 nt, synthetic construct; identical to SEQ ID NO: 19124
  source 1..111: mol_type = other RNA

SEQ ID NO: 19134 - RNA, 111 nt, synthetic construct; identical to SEQ ID NO: 19124
  source 1..111: mol_type = other RNA

SEQ ID NO: 19135 - RNA, 307 nt, synthetic construct
  source 1..307: mol_type = other RNA
gggataattgataagattccgtaagagccaaacctagcattttatgggttaatagcccatcgggccatgagtcatggtttcgcctagtattttagctatgcccgtcgttcagttcgctgaacaaacggcagaagctggaggaggaagggcctgagtccgagcagaagaattacgtctgcaaagttctcccatcacatcaaccggtggcgcattgccacgaagcaggccaatggggaggacatcgatgtcatcagcgaactgatcgacgtgctcaagtaggtttggctcttacggaatcttatcagat

SEQ ID NO: 19136 - RNA, 326 nt, synthetic construct
  source 1..326: mol_type = other RNA
gggataattgataagattccgtaagagccaaacctagcattttatgggttaatagcccatcgggccatgagtcatggtttcgcctagtattttagctatgcccgtcgttcagttcgctgaacaaacggcagaagctggaggaggaagggcctgagtccgagcagaagaattacgtctgcaaagttctcccatcacatcaaccggtggcgcattgccacgaagcaggccaatggggaggacatcgatgtcatcagcgaactgatcgacgtgctcaagtaggtttggctcttacggaatcttatcaacatgaggatcacccatgtgat

SEQ ID NO: 19137 - RNA, 1201 nt, synthetic construct
  source 1..1201: mol_type = other RNA
agggggaaataagagagaaaagaagagtaagaagaaatataagagccaccatggagcccaatgactacgtaaataggttgcgacatgctatggaaataagtgaaaacccgcgctttagccctgagtacattgctcaatgttgtacttacgccgagaatctcctcaagcaagggctgccagttctgttcgatcaaacgcatattcggaaagttctggggatggcggcacctcgattgtgtgattatcacagattcacaatcccaaagcacaacggatctagaattatcacggccccatctaggaagctgaagcttcgacaacaatggatataccagaatatccttatacgaaaggaggcttcaccgtacacgcacggatttgttcctgaacgcagcatcgtgactaacgcaatcctccatataggatacgcatacacctactgcgtggatatcacggatttctttcctagcatcactaagaagcaggtcttgcctatattccgaaatatgggctatagtggttctgctgcaaatactctctgcgacctctgttgctatgacggggtcctcccccagggggcgcctactagcccatacctcagtaacatgatttgtcgcgatcttgatgacgaattgggggctatggcgcggcggttccgggggatttttacacggtatgcggatgacatagctatctccacaaaccaacaacagccgcaacttttggatgccttgggacttatcctcgggaagcacggatttcttatgaatctcgataagtgtcgagtctataatcctggacagcccaaaagaattactggattgaccgttcacaatagagtatcagttccgaaaacctttaagcggaaattgcggcaggaaatacattactgtcagaagttcggagtgactgcacatttggaaaacacgaaggctgcacgatccatccactatagggaacatctgtatggaaaggcatactatgttaaaatggttgagcctgagctcggggcgcacttcctcgatgagttgtcaaaggtagactggccagagccaccaaagaagaaaagaaaggtctgataataggctggagcctcggtggccatgcttcttgccccttgggcctccccccagcccctcctccccttcctgcacccgtacccccgtggtctttgaataaagtctgagtgggcggccctgca

SEQ ID NO: 19138 - RNA, 442 nt, synthetic construct
  source 1..442: mol_type = other RNA
ggggtataaaaccgggaacgatcagaccggggtgaattcgcccccttgatcaaacggcactaaccactgtttgccgtgcgtgcgtacaaacggcagaagctggaggaggaagggcctgagtccgagcagaagaaaactcgagctctgatcagtatcatggggcccatggttgaatgactcctataaagttctcccatcacatcaaccggtggcgcattgccacgaagcaggccaatggggaggacatcgatgtcaacgcacgcacggcaaacagacagatccattattattacaatttatttagtgatcgttcccggttttatacgagtccgagcagaagaagaagtttcagagctatgctggaaacagcatagcaagttgaaataaggctagtccgttatcaacttgaaaaagtggcaccgagtcggtgctttttcctgca

SEQ ID NO: 19139 - RNA, 442 nt, synthetic construct
  source 1..442: mol_type = other RNA
ggggagtccgagcagaagaagaagtttcagagctatgctggaaacagcatagcaagttgaaataaggctagtccgttatcaacttgaaaaagtggcaccgagtcggtgctttttgtataaaaccgggaacgatcagaccggggtgaattcgcccccttgatcaaacggcactaaccactgtttgccgtgcgtgcgtacaaacggcagaagctggaggaggaagggcctgagtccgagcagaagaaaactcgagctctgatcagtatcatggggcccatggttgaatgactcctataaagttctcccatcacatcaaccggtggcgcattgccacgaagcaggccaatggggaggacatcgatgtcaacgcacgcacggcaaacagacagatccattattattacaatttatttagtgatcgttcccggttttataccctgca

SEQ ID NO: 19140 - RNA, 435 nt, synthetic construct
  source 1..435: mol_type = other RNA
gagtccgagcagaagaagaagtttcagagctatgctggaaacagcatagcaagttgaaataaggctagtccgttatcaacttgaaaaagtggcaccgagtcggtgctttttaataacaacgaaatgataagattccgtaagagccaaacctagcattttatgggttaatagcccatcgggccatgagtcatggtttcgcctagtattttagctatgcccgtcgttcagttcgctgaacaaacggcagaagctggaggaggaagggcctgagtccgagcagaagaaaactcgagctctgaatgactcctataaagttctcccatcacatcaaccggtggcgcattgccacgaagcaggccaatggggaggacatcgatgtcatcagcgaactgatcgacgtgctcaagtaggtttggctcttacggaatcttatca

SEQ ID NO: 19141 - RNA, 300 nt, synthetic construct
  source 1..300: mol_type = other RNA
gaaatgataagattccgtaagagccaaacctagcattttatgggttaatagcccatcgggccatgagtcatggtttcgcctagtattttagctatgcccgtcgttcagttcgctgaacaaacggcagaagctggaggaggaagggcctgagtccgagcagaagaattacgtctgcaaagttctcccatcacatcaaccggtggcgcattgccacgaagcaggccaatggggaggacatcgatgtcatcagcgaactgatcgacgtgctcaagtaggtttggctcttacggaatcttatca

SEQ ID NO: 19142 - RNA, 424 nt, synthetic construct
  source 1..424: mol_type = other RNA
gaaatgataagattccgtaagagccaaacctagcattttatgggttaatagcccatcgggccatgagtcatggtttcgcctagtattttagctatgcccgtcgttcagttcgctgactgtcccctccaccccacagtggggccactagggacagaaatgacagtggttggtgctctaaaaattaatgacagaaaagccccatccttaggcctcctccttcctagtctcctgatattgggtctaacccccatcagcgaactgatcgacgtgctcaagtaggtttggctcttacggaatcttatcaaataacaacggggccactagggacaggatgtttcagagctatgctggaaacagcatagcaagttgaaataaggctagtccgttatcaacttgaaaaagtggcaccgagtcggtgcttttt

SEQ ID NO: 19143 - RNA, 435 nt, synthetic construct
  source 1..435: mol_type = other RNA
gaaatgataagattccgtaagagccaaacctagcattttatgggttaatagcccatcgggccatgagtcatggtttcgcctagtattttagctatgcccgtcgttcagttcgctgaacaaacggcagaagctggaggaggaagggcctgagtccgagcagaagaaaactcgagctctgaatgactcctataaagttctcccatcacatcaaccggtggcgcattgccacgaagcaggccaatggggaggacatcgatgtcatcagcgaactgatcgacgtgctcaagtaggtttggctcttacggaatcttatcaaataacaacgagtccgagcagaagaagaagtttcagagctatgctggaaacagcatagcaagttgaaataaggctagtccgttatcaacttgaaaaagtggcaccgagtcggtgcttttt

SEQ ID NO: 19144 - RNA, 460 nt, synthetic construct
  source 1..460: mol_type = other RNA
gaaatgataagattccgtaagagccaaacctagcattttatgggttaatagcccatcgggccatgagtcatggtttcgcctagtattttagctatgcccgtcgttcagttcgctgaacaaacggcagaagctggaggaggaagggcctgagtccgagcagaagaaaactcgagctctgatcagtatcatggggcccatggttgaatgactcctataaagttctcccatcacatcaaccggtggcgcattgccacgaagcaggccaatggggaggacatcgatgtcatcagcgaactgatcgacgtgctcaagtaggtttggctcttacggaatcttatcaaataacaacgagtccgagcagaagaagaagtttcagagctatgctggaaacagcatagcaagttgaaataaggctagtccgttatcaacttgaaaaagtggcaccgagtcggtgcttttt

SEQ ID NO: 19145 - RNA, 485 nt, synthetic construct
  source 1..485: mol_type = other RNA
gaaatgataagattccgtaagagccaaacctagcattttatgggttaatagcccatcgggccatgagtcatggtttcgcctagtattttagctatgcccgtcgttcagttcgctgaacaaacggcagaagctggaggaggaagggcctgagtccgagcagaagaaaactcgagctctgagccccaccgcagcttgccagcactttcagtatcatggggcccatggttgaatgactcctataaagttctcccatcacatcaaccggtggcgcattgccacgaagcaggccaatggggaggacatcgatgtcatcagcgaactgatcgacgtgctcaagtaggtttggctcttacggaatcttatcaaataacaacgagtccgagcagaagaagaagtttcagagctatgctggaaacagcatagcaagttgaaataaggctagtccgttatcaacttgaaaaagtggcaccgagtcggtgcttttt

SEQ ID NO: 19146 - RNA, 510 nt, synthetic construct
  source 1..510: mol_type = other RNA
gaaatgataagattccgtaagagccaaacctagcattttatgggttaatagcccatcgggccatgagtcatggtttcgcctagtattttagctatgcccgtcgttcagttcgctgaacaaacggcagaagctggaggaggaagggcctgagtccgagcagaagaaaactcgagctctgagccccactgtcgagaagtatgtatctcgctcccgcagcttgccagcactttcagtatcatggggcccatggttgaatgactcctataaagttctcccatcacatcaaccggtggcgcattgccacgaagcaggccaatggggaggacatcgatgtcatcagcgaactgatcgacgtgctcaagtaggtttggctcttacggaatcttatcaaataacaacgagtccgagcagaagaagaagtttcagagctatgctggaaacagcatagcaagttgaaataaggctagtccgttatcaacttgaaaaagtggcaccgagtcggtgcttttt

SEQ ID NO: 19147 - RNA, 1674 nt, synthetic construct
  source 1..1674: mol_type = other RNA
gaaatgataagattccgtaagagccaaacctagcattttatgggttaatagcccatcgggccatgagtcatggtttcgcctagtattttagctatgcccgtcgttcagttcgctgaacaaacggcagaagctggaggaggaagggcctgagtccgagcagaagaacccatatgtccttccgagtgagagacacaaaaaattccaacacactattgcaatgaaaataaatttcctttattagccagaagtcagatgctcaaggggcttcatgatgtccccataatttttggcagagggaaaaagatctcagtggtatttgtgagccagggcattggccacaccagccaccaccttctgataggcagcctgcacctgaggagtgcggccgctttacttgtacagctcgtccatgccgagagtgatcccggcggcggtcacgaactccagcaggaccatgtgatcgcgcttctcgttggggtctttgctcagggcggactgggtgctcaggtagtggttgtcgggcagcagcacggggccgtcgccgatgggggtgttctgctggtagtggtcggcgagctgcacgctgccgtcctcgatgttgtggcggatcttgaagttcaccttgatgccgttcttctgcttgtcggccatgatatagacgttgtggctgttgtagttgtactccagcttgtgccccaggatgttgccgtcctccttgaagtcgatgcccttcagctcgatgcggttcaccagggtgtcgccctcgaacttcacctcggcgcgggtcttgtagttgccgtcgtccttgaagaagatggtgcgctcctggacgtagccttcgggcatggcggacttgaagaagtcgtgctgcttcatgtggtcggggtagcggctgaagcactgcacgccgtaggtcagggtggtcacgagggtgggccagggcacgggcagcttgccggtggtgcagatgaacttcagggtcagcttgccgtaggtggcatcgccctcgccctcgccggacacgctgaacttgtggccgtttacgtcgccgtccagctcgaccaggatgggcaccaccccggtgaacagctcctcgcccttgctcaccatggtggcgaccggtggatcccgggcccgcggtaccgtcgactgcagaattcgaagcttgagctcgagatctgagtccggtagcgctagcggatctgacggttcactaaaccctgtgttctggcggcaaacccgttgcgaaaaagaacgttcacggcgactactgcacttatatacggttctcccccaccctcgggaaaaaggcggagccagtacacgacatcactttcccagtttaccccgcgccaccttctctaggcaccggttcaattgccgacccctccccccaacttctcggggactgtgggcgatgtgcgctctgcccgttctcccatcacatcaaccggtggcgcattgccacgaagcaggccaatggggaggacatcgatgtcatcagcgaactgatcgacgtgctcaagtaggtttggctcttacggaatcttatcaaataacaacgagtccgagcagaagaagaagtttcagagctatgctggaaacagcatagcaagttgaaataaggctagtccgttatcaacttgaaaaagtggcaccgagtcggtgcttttt

SEQ ID NO: 19148 - RNA, 435 nt, synthetic construct
  source 1..435: mol_type = other RNA
gaaatgataagattccgtaagagccaaacctagcattttatgggttaatagcccatcgggccatgagtcatggtttcgcctagtattttagctatgcccgtcgttcagttcgctgatgacatcgatgtcctccccattggcctgcttcgtggcaatgcgccaccggttgatgtgatgggagaactttataggagtcattcagagctcgagttttcttctgctcggactcaggcccttcctcctccagcttctgccgtttgttcagcgaactgatcgacgtgctcaagtaggtttggctcttacggaatcttatcaaataacaacgagtccgagcagaagaagaagtttcagagctatgctggaaacagcatagcaagttgaaataaggctagtccgttatcaacttgaaaaagtggcaccgagtcggtgcttttt

SEQ ID NO: 19149 - RNA, 417 nt, synthetic construct
  source 1..417: mol_type = other RNA
gagtccgagcagaagaagaagtttcagagctatgctggaaacagcatagcaagttgaaataaggctagtccgttatcaacttgaaaaagtggcaccgagtcggtgctttttaataacaacgtataaaaccgggaacgatcagaccggggtgaattcgcccccttgatcaaacggcactaaccactgtttgccgtgcgtgcgtacaaacggcagaagctggaggaggaagggcctgagtccgagcagaagaaaactcgagctctgaatgactcctataaagttctcccatcacatcaaccggtggcgcattgccacgaagcaggccaatggggaggacatcgatgtcaacgcacgcacggcaaacagacagatccattattattacaatttatttagtgatcgttcccggttttatac

SEQ ID NO: 19150 - RNA, 297 nt, synthetic construct
  source 1..297: mol_type = other RNA
gtataaaaccgggaacgatcagaccggggtgaattcgcccccttgatcaaacggcactaaccactgtttgccgtgcgtgcgtacaaacggcagaagctggaggaggaagggcctgagtccgagcagaagaaaactcgagctctgaatgactcctataaagttctcccatcacatcaaccggtggcgcattgccacgaagcaggccaatggggaggacatcgatgtcaacgcacgcacggcaaacagacagatccattattattacaatttatttagtgatcgttcccggttttatac

SEQ ID NO: 19151 - RNA, 407 nt, synthetic construct
  source 1..407: mol_type = other RNA
gtataaaaccgggaacgatcagaccggggtgaattcgcccccttgatcaaacggcactaaccactgtttgccgtgcgtgcgttctgtcccctccaccccacagtggggccactagggacagaaatgacagtggttggtgctctaaaaattaatgacagaaaagccccatccttaggcctcctccttcctagtctcctgatattgggtctaacccccaacgcacgcacggcaaacagacagatccattattattacaatttatttagtgatcgttcccggttttatacaataacaacggggccactagggacaggatgtttcagagctatgctggaaacagcatagcaagttgaaataaggctagtccgttatcaacttgaaaaagtggcaccgagtcggtgcttttt

SEQ ID NO: 19152 - RNA, 417 nt, synthetic construct
  source 1..417: mol_type = other RNA
gtataaaaccgggaacgatcagaccggggtgaattcgcccccttgatcaaacggcactaaccactgtttgccgtgcgtgcgtacaaacggcagaagctggaggaggaagggcctgagtccgagcagaagaaaactcgagctctgaatgactcctataaagttctcccatcacatcaaccggtggcgcattgccacgaagcaggccaatggggaggacatcgatgtcaacgcacgcacggcaaacagacagatccattattattacaatttatttagtgatcgttcccggttttatacaataacaacgagtccgagcagaagaagaagtttcagagctatgctggaaacagcatagcaagttgaaataaggctagtccgttatcaacttgaaaaagtggcaccgagtcggtgcttttt

SEQ ID NO: 19153 - RNA, 417 nt, synthetic construct; identical to SEQ ID NO: 19152
  source 1..417: mol_type = other RNA

SEQ ID NO: 19154 - RNA, 467 nt, synthetic construct
  source 1..467: mol_type = other RNA
gtataaaaccgggaacgatcagaccggggtgaattcgcccccttgatcaaacggcactaaccactgtttgccgtgcgtgcgtacaaacggcagaagctggaggaggaagggcctgagtccgagcagaagaaaactcgagctctgagccccaccgcagcttgccagcactttcagtatcatggggcccatggttgaatgactcctataaagttctcccatcacatcaaccggtggcgcattgccacgaagcaggccaatggggaggacatcgatgtcaacgcacgcacggcaaacagacagatccattattattacaatttatttagtgatcgttcccggttttatacaataacaacgagtccgagcagaagaagaagtttcagagctatgctggaaacagcatagcaagttgaaataaggctagtccgttatcaacttgaaaaagtggcaccgagtcggtgcttttt

SEQ ID NO: 19155 - RNA, 492 nt, synthetic construct
  source 1..492: mol_type = other RNA
gtataaaaccgggaacgatcagaccggggtgaattcgcccccttgatcaaacggcactaaccactgtttgccgtgcgtgcgtacaaacggcagaagctggaggaggaagggcctgagtccgagcagaagaaaactcgagctctgagccccactgtcgagaagtatgtatctcgctcccgcagcttgccagcactttcagtatcatggggcccatggttgaatgactcctataaagttctcccatcacatcaaccggtggcgcattgccacgaagcaggccaatggggaggacatcgatgtcaacgcacgcacggcaaacagacagatccattattattacaatttatttagtgatcgttcccggttttatacaataacaacgagtccgagcagaagaagaagtttcagagctatgctggaaacagcatagcaagttgaaataaggctagtccgttatcaacttgaaaaagtggcaccgagtcggtgcttttt

SEQ ID NO: 19156 - RNA, 1656 nt, synthetic construct
  source 1..1656: mol_type = other RNA
gtataaaaccgggaacgatcagaccggggtgaattcgcccccttgatcaaacggcactaaccactgtttgccgtgcgtgcgtacaaacggcagaagctggaggaggaagggcctgagtccgagcagaagaacccatatgtccttccgagtgagagacacaaaaaattccaacacactattgcaatgaaaataaatttcctttattagccagaagtcagatgctcaaggggcttcatgatgtccccataatttttggcagagggaaaaagatctcagtggtatttgtgagccagggcattggccacaccagccaccaccttctgataggcagcctgcacctgaggagtgcggccgctttacttgtacagctcgtccatgccgagagtgatcccggcggcggtcacgaactccagcaggaccatgtgatcgcgcttctcgttggggtctttgctcagggcggactgggtgctcaggtagtggttgtcgggcagcagcacggggccgtcgccgatgggggtgttctgctggtagtggtcggcgagctgcacgctgccgtcctcgatgttgtggcggatcttgaagttcaccttgatgccgttcttctgcttgtcggccatgatatagacgttgtggctgttgtagttgtactccagcttgtgccccaggatgttgccgtcctccttgaagtcgatgcccttcagctcgatgcggttcaccagggtgtcgccctcgaacttcacctcggcgcgggtcttgtagttgccgtcgtccttgaagaagatggtgcgctcctggacgtagccttcgggcatggcggacttgaagaagtcgtgctgcttcatgtggtcggggtagcggctgaagcactgcacgccgtaggtcagggtggtcacgagggtgggccagggcacgggcagcttgccggtggtgcagatgaacttcagggtcagcttgccgtaggtggcatcgccctcgccctcgccggacacgctgaacttgtggccgtttacgtcgccgtccagctcgaccaggatgggcaccaccccggtgaacagctcctcgcccttgctcaccatggtggcgaccggtggatcccgggcccgcggtaccgtcgactgcagaattcgaagcttgagctcgagatctgagtccggtagcgctagcggatctgacggttcactaaaccctgtgttctggcggcaaacccgttgcgaaaaagaacgttcacggcgactactgcacttatatacggttctcccccaccctcgggaaaaaggcggagccagtacacgacatcactttcccagtttaccccgcgccaccttctctaggcaccggttcaattgccgacccctccccccaacttctcggggactgtgggcgatgtgcgctctgcccgttctcccatcacatcaaccggtggcgcattgccacgaagcaggccaatggggaggacatcgatgtcaacgcacgcacggcaaacagacagatccattattattacaatttatttagtgatcgttcccggttttatacaataacaacgagtccgagcagaagaagaagtttcagagctatgctggaaacagcatagcaagttgaaataaggctagtccgttatcaacttgaaaaagtggcaccgagtcggtgcttttt

SEQ ID NO: 19157 - RNA, 417 nt, synthetic construct
  source 1..417: mol_type = other RNA
gtataaaaccgggaacgatcagaccggggtgaattcgcccccttgatcaaacggcactaaccactgtttgccgtgcgtgcgttgacatcgatgtcctccccattggcctgcttcgtggcaatgcgccaccggttgatgtgatgggagaactttataggagtcattcagagctcgagttttcttctgctcggactcaggcccttcctcctccagcttctgccgtttgtacgcacgcacggcaaacagacagatccattattattacaatttatttagtgatcgttcccggttttatacaataacaacgagtccgagcagaagaagaagtttcagagctatgctggaaacagcatagcaagttgaaataaggctagtccgttatcaacttgaaaaagtggcaccgagtcggtgcttttt

SEQ ID NO: 19158 - RNA, 482 nt, synthetic construct
  source 1..482: mol_type = other RNA
gagtccgagcagaagaagaagtttcagagctatgctggaaacagcatagcaagttgaaataaggctagtccgttatcaacttgaaaaagtggcaccgagtcggtgctttttaataacaacgcgttaaggtggttatattctagtatttatgaagtgtagtcgcttcgatcgttaaggctgattttaacctctgcataataatatcggtagatattattatgcacgctccctttagcagagctaagaatcgctcactcaggcacaagctttgaggacaaacggcagaagctggaggaggaagggcctgagtccgagcagaagaaaactcgagctctgaatgactcctataaagttctcccatcacatcaaccggtggcgcattgccacgaagcaggccaatggggaggacatcgatgtcacctcaaagcttgtgcctgagtgagagctaaagaaaagaaaagtagaataagccaccttaacgc

SEQ ID NO: 19159 - RNA, 362 nt, synthetic construct
  source 1..362: mol_type = other RNA
gcgttaaggtggttatattctagtatttatgaagtgtagtcgcttcgatcgttaaggctgattttaacctctgcataataatatcggtagatattattatgcacgctccctttagcagagctaagaatcgctcactcaggcacaagctttgaggacaaacggcagaagctggaggaggaagggcctgagtccgagcagaagaaaactcgagctctgaatgactcctataaagttctcccatcacatcaaccggtggcgcattgccacgaagcaggccaatggggaggacatcgatgtcacctcaaagcttgtgcctgagtgagagctaaagaaaagaaaagtagaataagccaccttaacgc

SEQ ID NO: 19160 - RNA, 472 nt, synthetic construct
  source 1..472: mol_type = other RNA
gcgttaaggtggttatattctagtatttatgaagtgtagtcgcttcgatcgttaaggctgattttaacctctgcataataatatcggtagatattattatgcacgctccctttagcagagctaagaatcgctcactcaggcacaagctttgaggtctgtcccctccaccccacagtggggccactagggacagaaatgacagtggttggtgctctaaaaattaatgacagaaaagccccatccttaggcctcctccttcctagtctcctgatattgggtctaacccccacctcaaagcttgtgcctgagtgagagctaaagaaaagaaaagtagaataagccaccttaacgcaataacaacggggccactagggacaggatgtttcagagctatgctggaaacagcatagcaagttgaaataaggctagtccgttatcaacttgaaaaagtggcaccgagtcggtgcttttt

SEQ ID NO: 19161 - RNA, 482 nt, synthetic construct
  source 1..482: mol_type = other RNA
gcgttaaggtggttatattctagtatttatgaagtgtagtcgcttcgatcgttaaggctgattttaacctctgcataataatatcggtagatattattatgcacgctccctttagcagagctaagaatcgctcactcaggcacaagctttgaggacaaacggcagaagctggaggaggaagggcctgagtccgagcagaagaaaactcgagctctgaatgactcctataaagttctcccatcacatcaaccggtggcgcattgccacgaagcaggccaatggggaggacatcgatgtcacctcaaagcttgtgcctgagtgagagctaaagaaaagaaaagtagaataagccaccttaacgcaataacaacgagtccgagcagaagaagaagtttcagagctatgctggaaacagcatagcaagttgaaataaggctagtccgttatcaacttgaaaaagtggcaccgagtcggtgcttttt

SEQ ID NO: 19162 - RNA, 507 nt, synthetic construct
  source 1..507: mol_type = other RNA
gcgttaaggtggttatattctagtatttatgaagtgtagtcgcttcgatcgttaaggctgattttaacctctgcataataatatcggtagatattattatgcacgctccctttagcagagctaagaatcgctcactcaggcacaagctttgaggacaaacggcagaagctggaggaggaagggcctgagtccgagcagaagaaaactcgagctctgatcagtatcatggggcccatggttgaatgactcctataaagttctcccatcacatcaaccggtggcgcattgccacgaagcaggccaatggggaggacatcgatgtcacctcaaagcttgtgcctgagtgagagctaaagaaaagaaaagtagaataagccaccttaacgcaataacaacgagtccgagcagaagaagaagtttcagagctatgctggaaacagcatagcaagttgaaataaggctagtccgttatcaacttgaaaaagtggcaccgagtcggtgcttttt

SEQ ID NO: 19163 - RNA, 532 nt, synthetic construct
  source 1..532: mol_type = other RNA
gcgttaaggtggttatattctagtatttatgaagtgtagtcgcttcgatcgttaaggctgattttaacctctgcataataatatcggtagatattattatgcacgctccctttagcagagctaagaatcgctcactcaggcacaagctttgaggacaaacggcagaagctggaggaggaagggcctgagtccgagcagaagaaaactcgagctctgagccccaccgcagcttgccagcactttcagtatcatggggcccatggttgaatgactcctataaagttctcccatcacatcaaccggtggcgcattgccacgaagcaggccaatggggaggacatcgatgtcacctcaaagcttgtgcctgagtgagagctaaagaaaagaaaagtagaataagccaccttaacgcaataacaacgagtccgagcagaagaagaagtttcagagctatgctggaaacagcatagcaagttgaaataaggctagtccgttatcaacttgaaaaagtggcaccgagtcggtgcttttt

SEQ ID NO: 19164 - RNA, 557 nt, synthetic construct
  source 1..557: mol_type = other RNA
gcgttaaggtggttatattctagtatttatgaagtgtagtcgcttcgatcgttaaggctgattttaacctctgcataataatatcggtagatattattatgcacgctccctttagcagagctaagaatcgctcactcaggcacaagctttgaggacaaacggcagaagctggaggaggaagggcctgagtccgagcagaagaaaactcgagctctgagccccactgtcgagaagtatgtatctcgctcccgcagcttgccagcactttcagtatcatggggcccatggttgaatgactcctataaagttctcccatcacatcaaccggtggcgcattgccacgaagcaggccaatggggaggacatcgatgtcacctcaaagcttgtgcctgagtgagagctaaagaaaagaaaagtagaataagccaccttaacgcaataacaacgagtccgagcagaagaagaagtttcagagctatgctggaaacagcatagcaagttgaaataaggctagtccgttatcaacttgaaaaagtggcaccgagtcggtgcttttt

SEQ ID NO: 19165 - RNA, 482 nt, synthetic construct
  source 1..482: mol_type = other RNA
gcgttaaggtggttatattctagtatttatgaagtgtagtcgcttcgatcgttaaggctgattttaacctctgcataataatatcggtagatattattatgcacgctccctttagcagagctaagaatcgctcactcaggcacaagctttgaggtgacatcgatgtcctccccattggcctgcttcgtggcaatgcgccacctatagttagtgtactgcaactttataggagtcattcagagctcgagttttcttctgctcggactcaggcccttcctcctccagcttctgccgtttgtcctcaaagcttgtgcctgagtgagagctaaagaaaagaaaagtagaataagccaccttaacgcaataacaacgagtccgagcagaagaagaagtttcagagctatgctggaaacagcatagcaagttgaaataaggctagtccgttatcaacttgaaaaagtggcaccgagtcggtgcttttt

SEQ ID NO: 19166 - RNA, 1047 nt, synthetic construct
  source 1..1047: mol_type = other RNA
atgaaggacgaccagtactctcagtggaagaagtactacgagagcaggggcatcctgcccgagatccaggacaagctcctgaactacgccaagatccacatcgacaacaacaccccggtgatcttcaacttcgagcacctgaccctgctgctgggcagggagaagaactacctgtccagcgtggtgaacagccccgacagccactacagaaagttcaagatcaagaagagatccggaggcgagagggagatcaccgctccctatctcagcctcctggagatgcagtactggatctacaggaacatcctgatcaacgtgaagatccactacgccgctcacggcttcgctcaggataagagcattatcaccaactccaggaaccacctggggcagaaacatctgctcaagatggatctgaaggatttcttccccagcatcaagctgaacagaatcatctacatcttcaagagcctgggctaccccaatatcatcgccttctacctggccagcatctgcagctacaagggccacctgccccagggcagccccacaagccctatcctgagcaacatcgtgagcatcaccctggacaacagactggtgaagttcgccagaaagatgaagctgagatacagcaggtacgccgacgacctgacgttcagcggggacaagatccccaccaactacatcaagtacatcaccgacatcatcaatgatgagggcttcgaggtgaacgacaccaagaccaagctctacctgaaggccgggaagagaatcgtgacgggcatttccgtgatcggaaatgacccgaagcttccgcgggaatacaagcggaagctgaagcaggagctgcactacatcttcacctacggcatcggcagccacatggccaagaagaagatcaagaagatcaactacctctacaggatcatcggcaaggtgaacttctggctgaacatcgagcccgacaacgagtacgccagaaacgccaaggccaagctgctgctgctcatcgacaacccaccaaagaagaaaagaaaggtctga

SEQ ID NO: 19167 - RNA, 1524 nt, synthetic construct
  source 1..1524: mol_type = other RNA
atggaggagagcaccaactacaagctgctggtgtggggactgagcgtgatccaacccgctacccccaacgaggtgctgaactacctcaccagcaccctgaacgataacgggctgctgcccgacgtggagaagatgatccactactttgagctgctggaccagctgggctacatccaccaggtgagcaagaggaacaacctctactcactgacccccaggggcaacgaaaggttgacccctgccctgaagagactcagggacaagatcagactgttcatgctggacaactgccacagcatcagcaagctgggcgtgctggccagcacagatacagagaacatggggggcgacagcccctcactccagctgaggcacaacctcaaggaggtgcctcatcccagccttagctgggctgctggaaccctgcctagctctcctaggcaggcttgggttcggatctacgaacagctgaacatcggcagcatgagcagcgacgaggctagcacacccaccaccgccagaaatgcccccctgagcttcgtgggcaggctgggcttcagcctgaactactacagcttcaacaagatcgacgagcccctgttcaacaacgatggcgtgaccgccatcgccagctgcatcggcatcagccccgggctgattaccgctatggtgaagtcaccaaagcggtactacaggaccttcaacctgagaaagaagtccgggggcttcagatccattctggcccccagaaagttcatcaagaccatccagtactggctgaaggatcatgtgctgaacaggctcaagatccacagctcctgttacagctacaggagcggcgtgtccatcaaggacaacgccatcaaccacgtgaagaagaagttcgtggccagcatcgacatttccgattacttcggaagcatcaacaagaagatggtgaaggactgcttttacaagaacaatattcccgatcacatcgtgaataccatcagcggcatcgtgacctacaacgacgtgctgcctcagggcgctcccaccagccctatcattagcaacgccatcctgttcgagttcgacgaggagatgacggctcatgccctcactctcgactgtatctacaccagatacagcgacgacatctcgatatcctccgactataaggagaatatcgccatcctgatcaacatcgccgaggccaacctgttgagcgctggattcacgctcaacagacagaagcaaaggattgcttctgacaacagccgccaggttgtgaccggcatcctggtgaacgagagcatcagacccaccagatgctacagaaagaagatcagaagcgcctttgatcacgccctgaaggagcaggacggctcccagctgacaatcaacaagttgaggggctacctcaactacctgaagtccttcgagacctacggcttcaagttcaacgagaagaagtataaggagaccctggatttcctgatcgctctgaagcagagcccaccaaagaagaaaagaaaggtctga

SEQ ID NO: 19168 - RNA, 1693 nt, synthetic construct
  source 1..1693: mol_type = other RNA
gcggagtgctggcctcaactgatacagagaatatgggcggtgattcgccgtctttacagttaaggcacaatttaaaagaggttccgcacccaagcctgtcttgggctgcacaaacggcagaagctggaggaggaagggcctgagtccgagcagaagaacccatatgtccttccgagtgagagacacaaaaaattccaacacactattgcaatgaaaataaatttcctttattagccagaagtcagatgctcaaggggcttcatgatgtccccataatttttggcagagggaaaaagatctcagtggtatttgtgagccagggcattggccacaccagccaccaccttctgataggcagcctgcacctgaggagtgcggccgctttacttgtacagctcgtccatgccgagagtgatcccggcggcggtcacgaactccagcaggaccatgtgatcgcgcttctcgttggggtctttgctcagggcggactgggtgctcaggtagtggttgtcgggcagcagcacggggccgtcgccgatgggggtgttctgctggtagtggtcggcgagctgcacgctgccgtcctcgatgttgtggcggatcttgaagttcaccttgatgccgttcttctgcttgtcggccatgatatagacgttgtggctgttgtagttgtactccagcttgtgccccaggatgttgccgtcctccttgaagtcgatgcccttcagctcgatgcggttcaccagggtgtcgccctcgaacttcacctcggcgcgggtcttgtagttgccgtcgtccttgaagaagatggtgcgctcctggacgtagccttcgggcatggcggacttgaagaagtcgtgctgcttcatgtggtcggggtagcggctgaagcactgcacgccgtaggtcagggtggtcacgagggtgggccagggcacgggcagcttgccggtggtgcagatgaacttcagggtcagcttgccgtaggtggcatcgccctcgccctcgccggacacgctgaacttgtggccgtttacgtcgccgtccagctcgaccaggatgggcaccaccccggtgaacagctcctcgcccttgctcaccatggtggcgaccggtggatcccgggcccgcggtaccgtcgactgcagaattcgaagcttgagctcgagatctgagtccggtagcgctagcggatctgacggttcactaaaccctgtgttctggcggcaaacccgttgcgaaaaagaacgttcacggcgactactgcacttatatacggttctcccccaccctcgggaaaaaggcggagccagtacacgacatcactttcccagtttaccccgcgccaccttctctaggcaccggttcaattgccgacccctccccccaacttctcggggactgtgggcgatgtgcgctctgcccgttctcccatcacatcaaccggtggcgcattgccacgaagcaggccaatggggaggacatcgatgtcagcagcccaagacaggcttgggtgcggatctacgagcaattaaatattggttcgatgtccagtgatgaggccagcacccgcaataacaacgagtccgagcagaagaagaagtttcagagctatgctggaaacagcatagcaagttgaaataaggctagtccgttatcaacttgaaaaagtggcaccgagtcggtgcttttt

SEQ ID NO: 19169 - RNA, 529 nt, synthetic construct
  source 1..529: mol_type = other RNA
gcggagtgctggcctcaactgatacagagaatatgggcggtgattcgccgtctttacagttaaggcacaatttaaaagaggttccgcacccaagcctgtcttgggctgcacaaacggcagaagctggaggaggaagggcctgagtccgagcagaagaaaactcgagctctgagccccactgtcgagaagtatgtatctcgctcccgcagcttgccagcactttcagtatcatggggcccatggttgaatgactcctataaagttctcccatcacatcaaccggtggcgcattgccacgaagcaggccaatggggaggacatcgatgtcagcagcccaagacaggcttgggtgcggatctacgagcaattaaatattggttcgatgtccagtgatgaggccagcacccgcaataacaacgagtccgagcagaagaagaagtttcagagctatgctggaaacagcatagcaagttgaaataaggctagtccgttatcaacttgaaaaagtggcaccgagtcggtgcttttt

SEQ ID NO: 19170 - RNA, 504 nt, synthetic construct
  source 1..504: mol_type = other RNA
gcggagtgctggcctcaactgatacagagaatatgggcggtgattcgccgtctttacagttaaggcacaatttaaaagaggttccgcacccaagcctgtcttgggctgcacaaacggcagaagctggaggaggaagggcctgagtccgagcagaagaaaactcgagctctgagccccaccgcagcttgccagcactttcagtatcatggggcccatggttgaatgactcctataaagttctcccatcacatcaaccggtggcgcattgccacgaagcaggccaatggggaggacatcgatgtcagcagcccaagacaggcttgggtgcggatctacgagcaattaaatattggttcgatgtccagtgatgaggccagcacccgcaataacaacgagtccgagcagaagaagaagtttcagagctatgctggaaacagcatagcaagttgaaataaggctagtccgttatcaacttgaaaaagtggcaccgagtcggtgcttttt

SEQ ID NO: 19171 - RNA, 479 nt, synthetic construct
  source 1..479: mol_type = other RNA
gcggagtgctggcctcaactgatacagagaatatgggcggtgattcgccgtctttacagttaaggcacaatttaaaagaggttccgcacccaagcctgtcttgggctgcacaaacggcagaagctggaggaggaagggcctgagtccgagcagaagaaaactcgagctctgatcagtatcatggggcccatggttgaatgactcctataaagttctcccatcacatcaaccggtggcgcattgccacgaagcaggccaatggggaggacatcgatgtcagcagcccaagacaggcttgggtgcggatctacgagcaattaaatattggttcgatgtccagtgatgaggccagcacccgcaataacaacgagtccgagcagaagaagaagtttcagagctatgctggaaacagcatagcaagttgaaataaggctagtccgttatcaacttgaaaaagtggcaccgagtcggtgcttttt

SEQ ID NO: 19172 - RNA, 454 nt, synthetic construct
  source 1..454: mol_type = other RNA
gcggagtgctggcctcaactgatacagagaatatgggcggtgattcgccgtctttacagttaaggcacaatttaaaagaggttccgcacccaagcctgtcttgggctgcacaaacggcagaagctggaggaggaagggcctgagtccgagcagaagaaaactcgagctctgaatgactcctataaagttctcccatcacatcaaccggtggcgcattgccacgaagcaggccaatggggaggacatcgatgtcagcagcccaagacaggcttgggtgcggatctacgagcaattaaatattggttcgatgtccagtgatgaggccagcacccgcaataacaacgagtccgagcagaagaagaagtttcagagctatgctggaaacagcatagcaagttgaaataaggctagtccgttatcaacttgaaaaagtggcaccgagtcggtgcttttt

SEQ ID NO: 19173 - RNA, 444 nt, synthetic construct
  source 1..444: mol_type = other RNA
gcggagtgctggcctcaactgatacagagaatatgggcggtgattcgccgtctttacagttaaggcacaatttaaaagaggttccgcacccaagcctgtcttgggctgctctgtcccctccaccccacagtggggccactagggacagaaatgacagtggttggtgctctaaaaattaatgacagaaaagccccatccttaggcctcctccttcctagtctcctgatattgggtctaacccccagcagcccaagacaggcttgggtgcggatctacgagcaattaaatattggttcgatgtccagtgatgaggccagcacccgcaataacaacggggccactagggacaggatgtttcagagctatgctggaaacagcatagcaagttgaaataaggctagtccgttatcaacttgaaaaagtggcaccgagtcggtgcttttt

SEQ ID NO: 19174 - RNA, 334 nt, synthetic construct
  source 1..334: mol_type = other RNA
gcggagtgctggcctcaactgatacagagaatatgggcggtgattcgccgtctttacagttaaggcacaatttaaaagaggttccgcacccaagcctgtcttgggctgcacaaacggcagaagctggaggaggaagggcctgagtccgagcagaagaaaactcgagctctgaatgactcctataaagttctcccatcacatcaaccggtggcgcattgccacgaagcaggccaatggggaggacatcgatgtcagcagcccaagacaggcttgggtgcggatctacgagcaattaaatattggttcgatgtccagtgatgaggccagcacccgc

SEQ ID NO: 19175 - RNA, 111 nt, synthetic construct
  source 1..111: mol_type = other RNA
ggggccactagggacaggatgtttcagagctatgctggaaacagcatagcaagttgaaataaggctagtccgttatcaacttgaaaaagtggcaccgagtcggtgcttttt

SEQ ID NO: 19176 - RNA, 1893 nt, synthetic construct
  source 1..1893: mol_type = other RNA
aggataatgggaaataagagagaaaagaagagtaagaagaaatataagagccaccatgatcagcttcagcgagatcaagagcagaaacgattttgcagacgctctgcagattcctcggagcgtgctgacgcacgttctgtacattgccaagcccgagagcttctacgagagcttcaccatccccaagaagaatggggaggacagaatcatcatggcccccaagggcaccctgaagtccatccagaccaagctgagcaagcagctggtggagtacagagcctccatcagccagaaaggccaggagaagtccaacatctcccatggcttcgagagggagaagtccatcatcaccaatgctcagatacaccgcaacaagcggtatgtcatcaactacgacctgaaggacttcttcgactccttccacttcggcagagtggtgggattcttcgagaagaacaagcacttcctgctgccctacgaggtggccgtgatcatcgcccagctgacctgctataatggcaggctgccccagggcgcccccacaagccctgtgatcaccaacctgatctgcgagatcctggactacagggtgctcaagatcgccaagagatacaagctggactacaccaggtacgctgacgacctgaccttcagcaccaactactccagattcctggaggtgttcgacagcttcgccaaggagctgctccaggagatcagcaactctggttttaccataaaccagagcaagaccaggctgctgtacagagacagccgccaggaggtcacaggcctcgtggtgaataagaagatcggcgtgaacagagagtacgtcaagagcactagggcgatggcccaggctctgtacagcaccggcgagttcaccatcaacggcatccccggcaccatcaaacagctggagggcaggttcggcttcatcgaccagctggaccactacaacaacgtgatcgacgatgccaagcacgacgcctactccctgaacggcagggagaagcagttccaggagttcctgttcttcaagacattcttcttcaacgagtaccccctggtgatcaccgagggcaagaccgacatcagatacctgaaggccgccctcaagagcctgcaccagaagtaccccgagctgatctgcaaggaggacgacggaacctttcggttcaagatcagcttcttcagaagatccaagagatggaagtacttcttcggcatcagcaaggatggcgctgatgccatgaagctgctgtaccggttctttaccggacagaagggcgtgaagaactactacaggctgttcgccgagaagtacaaggccgtgcagagaaaccccgtgatcatgctgtttgacaacgagatggagagcaagagacccctcaacaagttcatctccgaggaggtgaagattccctcctcggagcagcagctgttcaaggagcagctgtactaccacctgatccccggcagcaagacctacctgatgacccaccccttgcctcctggcaagacagaggccgagatcgaggacctgttccctaccgaggtgttgggcgtgaagctcgacggcaagagcttcagcaccaaggacaagttcgacaccagcaagttctacggcaaggacatcttcagcagctacgtgtacgagcactggaagtccatcgacttcagcggcttcatccccctgctggacaagatcaacatgctcgtgcagaacgagaagaagcccgggctgaacacaccaccaaagaagaaaagaaaggtctgagctggagcctcggtggccatgcttcttgccccttgggcctccccccagcccctcctccccttcctgcacccgtacccccgtggtctttgaataaagtctgagtgggcggcgat

SEQ ID NO: 19177 - RNA, 754 nt, synthetic construct
  source 1..754: mol_type = other RNA
gggataatgagcgtgtgacaagattttgggcttgtgtttcgcaagctttgattaaaatggtagatggatttgctatctatcgtcatttccagtactgttatgtacaaacggcagaagctggaggaggaagggcctgagtccgagcagaagaaacttcagctaaggaagctaccaatatttagtttctgagtctcacgacagacctcgcgcgtagattgccatgcgtagagctaacgagccagcggaaagcgtgaggcgcttttaagcatggcgagtaagtgatccaacgcttcggatatgactatatacttaggttcgatctcgtcccgagaattctaagcctcaacatctatgagttatgaggttagccgaaaaagcacgtggtggcgcccaccgactgttcccagactgtagctctttgttctgtcaaggcccgaccttcatcgcggccgattccttctgcggaccataccgtcctgatactttggtcatgtttccgttgtaggagtgaacccacttgcctttgcgtcttaataccaatgaaaaacctatgcactttgtacagggtaccatcgggattctgaaccctcagatagtggggatcccgggtatagacctttatctgcggtccaacttaggcataaacctccatgctacaaagttctcccatcacatcaaccggtggcgcattgccacgaagcaggccaatggggaggacatcgatgtcagcataatgagttgtcacacgctcgat

SEQ ID NO: 19178 - RNA, 554 nt, synthetic construct
  source 1..554: mol_type = other RNA
gggataatgagcgtgtgacaagattttgggcttgtgtttcgcaagctttgattaaaatggtagatggatttgctatctatcgtcatttccagtactgttatgtacaaacggcagaagctggaggaggaagggcctgagtccgagcagaagaacgactaccaaatccgcatgttacgggacttcttattaattcttttttcgtgaggagcagcggatcttaatggatggccgcaggtggtatggaagctaatagcgcgggtgagagggtaatcagccgtgtccaccaacacaacgctatcgggcgattctataagattccgcattgcgtctacttataagatgtctcaacggtatccgcaacttgcgatgtgcctgctatccttaaatgcatatctcgcccagtagcttcccaatatgagagcatcaattgtagatcgggccgggatagtcatgtcgtaaagttctcccatcacatcaaccggtggcgcattgccacgaagcaggccaatggggaggacatcgatgtcagcataatgagttgtcacacgctcgat

SEQ ID NO: 19179 - RNA, 274 nt, synthetic construct
  source 1..274: mol_type = other RNA
gggataatgagcgtgtgacaagattttgggcttgtgtttcgcaagctttgattaaaatggtagatggatttgctatctatcgtcatttccagtactgttatgtacaaacggcagaagctggaggaggaagggcctgagtccgagcagaagaaaactcgagctctgaatgactcctataaagttctcccatcacatcaaccggtggcgcattgccacgaagcaggccaatggggaggacatcgatgtcagcataatgagttgtcacacgctcgat

SEQ ID NO: 19180 - RNA, 654 nt, synthetic construct
  source 1..654: mol_type = other RNA
gggataatgagcgtgtgacaagattttgggcttgtgtttcgcaagctttgattaaaatggtagatggatttgctatctatcgtcatttccagtactgttatgtacaaacggcagaagctggaggaggaagggcctgagtccgagcagaagaactgctaaatccgcgtgataggggatttgaagtttaatcttctatcgcaaggaactgccgatcttaatggatggccggaggtggtatggaagctataagcgcgggtgagagggtaattaggcgtgttcacctacgctacgctaacgggcgattctataagattgcacattgcgtcaactcataagatgtctcaacggcatgcgcaacttgtgaagtgtctactatccttaaacgcatatctcgcacagtaactcccgaatatgtcggcatctgatgttgcccgggccgagttagtgttgagctcacggaacttattgtatgagtagtgatttgtaagagttgtcagttagctcgttcaggtaatagttgcccacacaacgtcaaaataagagaacggtcgtaacataaagttctcccatcacatcaaccggtggcgcattgccacgaagcaggccaatggggaggacatcgatgtcagcataatgagttgtcacacgctcgat

SEQ ID NO: 19181 - RNA, 454 nt, synthetic construct
  source 1..454: mol_type = other RNA
gggataatgagcgtgtgacaagattttgggcttgtgtttcgcaagctttgattaaaatggtagatggatttgctatctatcgtcatttccagtactgttatgtacaaacggcagaagctggaggaggaagggcctgagtccgagcagaagaaaaagcggtcttacggtcagtcgtattccttctcgagttccgtccagttgagcgtgtcactcccagtgtacctgcaagccgagatggctgtgcttggagtcaatcgcatgtaggatggtctccagacaccggggcaccagttttcacgcctaaagcataaacgacgagcagtcatgaaagtcttagtactggacgtgccgtttcacaaagttctcccatcacatcaaccggtggcgcattgccacgaagcaggccaatggggaggacatcgatgtcagcataatgagttgtcacacgctcgat

SEQ ID NO: 19182 - RNA, 574 nt, synthetic construct
  source 1..574: mol_type = other RNA
gggataatgagcgtgtgacaagattttgggcttgtgtttcgcaagctttgattaaaatggtagatggatttgctatctatcgtcatttccagtactgttatgtacaaacggcagaagctggaggaggaagggcctgagtccgagcagaagaaaaagcggtcttacggtcagtcgtattccttctcgagttccgtccagttgagcgtgtcactcccagtgtacctgcaagccgagatggctgtgcttggagtcaatcgcatgtaggatggtctccagacaccggggcaccagttttcacgcctaaagcataaacgacgagcagtcatgaaagtcttagtactggacgtgccgtttcacaaagttctcccatcacatcaaccggtggcgcattgccacgaagcaggccaatggggaggacatcgatgtcagcataatgagttgtcacacgctcaataacaacgagtccgagcagaagaagaagtttcagagctatgctggaaacagcatagcaagttgaaataaggctagtccgttatcaacttgaaaaagtggcaccgagtcggtgctttttgat

SEQ ID NO: 19183 - RNA, 574 nt, synthetic construct
  source 1..574: mol_type = other RNA
gggataatgagtccgagcagaagaagaagtttcagagctatgctggaaacagcatagcaagttgaaataaggctagtccgttatcaacttgaaaaagtggcaccgagtcggtgctttttaataacaacgagcgtgtgacaagattttgggcttgtgtttcgcaagctttgattaaaatggtagatggatttgctatctatcgtcatttccagtactgttatgtacaaacggcagaagctggaggaggaagggcctgagtccgagcagaagaaaaagcggtcttacggtcagtcgtattccttctcgagttccgtccagttgagcgtgtcactcccagtgtacctgcaagccgagatggctgtgcttggagtcaatcgcatgtaggatggtctccagacaccggggcaccagttttcacgcctaaagcataaacgacgagcagtcatgaaagtcttagtactggacgtgccgtttcacaaagttctcccatcacatcaaccggtggcgcattgccacgaagcaggccaatggggaggacatcgatgtcagcataatgagttgtcacacgctcgat

SEQ ID NO: 19184 - RNA, 444 nt, synthetic construct
  source 1..444: mol_type = other RNA
gggataatgagcgtgtgacaagattttgggcttgtgtttcgcaagctttgattaaaatggtagatggatttgctatctatcgtcatttccagtactgttatgttctgtcccctccaccccacagtggggccactagggacagaaagcggtcttacggtcagtcgtattccttctcgagttccgtccagttgagcgtgtcactcccagtgtacctgcaagccgagatggctgtgcttggagtcaatcgcatgtaggatggtctccagacaccggggcaccagttttcacgcctaaagcataaacgacgagcagtcatgaaagtcttagtactggacgtgccgtttcacaattaatgacagaaaagccccatccttaggcctcctccttcctagtctcctgatattgggtctaacccccagcataatgagttgtcacacgctcgat

SEQ ID NO: 19185 - RNA, 444 nt, synthetic construct; identical to SEQ ID NO: 19184
  source 1..444: mol_type = other RNA

SEQ ID NO: 19186 - RNA, 744 nt, synthetic construct
  source 1..744: mol_type = other RNA
gggataatgagcgtgtgacaagattttgggcttgtgtttcgcaagctttgattaaaatggtagatggatttgctatctatcgtcatttccagtactgttatgttctgtcccctccaccccacagtggggccactagggacagacttcagctaaggaagctaccaatatttagtttctgagtctcacgacagacctcgcgcgtagattgccatgcgtagagctaacgagccagcggaaagcgtgaggcgcttttaagcatggcgagtaagtgatccaacgcttcggatatgactatatacttaggttcgatctcgtcccgagaattctaagcctcaacatctatgagttatgaggttagccgaaaaagcacgtggtggcgcccaccgactgttcccagactgtagctctttgttctgtcaaggcccgaccttcatcgcggccgattccttctgcggaccataccgtcctgatactttggtcatgtttccgttgtaggagtgaacccacttgcctttgcgtcttaataccaatgaaaaacctatgcactttgtacagggtaccatcgggattctgaaccctcagatagtggggatcccgggtatagacctttatctgcggtccaacttaggcataaacctccatgctacaattaatgacagaaaagccccatccttaggcctcctccttcctagtctcctgatattgggtctaacccccagcataatgagttgtcacacgctcgat

SEQ ID NO: 19187 - RNA, 763 nt, synthetic construct
  source 1..763: mol_type = other RNA
gggataatgagcgtgtgacaagattttgggcttgtgtttcgcaagctttgattaaaatggtagatggatttgctatctatcgtcatttccagtactgttatgttctgtcccctccaccccacagtggggccactagggacagacttcagctaaggaagctaccaatatttagtttctgagtctcacgacagacctcgcgcgtagattgccatgcgtagagctaacgagccagcggaaagcgtgaggcgcttttaagcatggcgagtaagtgatccaacgcttcggatatgactatatacttaggttcgatctcgtcccgagaattctaagcctcaacatctatgagttatgaggttagccgaaaaagcacgtggtggcgcccaccgactgttcccagactgtagctctttgttctgtcaaggcccgaccttcatcgcggccgattccttctgcggaccataccgtcctgatactttggtcatgtttccgttgtaggagtgaacccacttgcctttgcgtcttaataccaatgaaaaacctatgcactttgtacagggtaccatcgggattctgaaccctcagatagtggggatcccgggtatagacctttatctgcggtccaacttaggcataaacctccatgctacaattaatgacagaaaagccccatccttaggcctcctccttcctagtctcctgatattgggtctaacccccagcataatgagttgtcacacgctcacatgaggatcacccatgtgat

SEQ ID NO: 19188 - RNA, 463 nt, synthetic construct
  source 1..463: mol_type = other RNA
gggataatgagcgtgtgacaagattttgggcttgtgtttcgcaagctttgattaaaatggtagatggatttgctatctatcgtcatttccagtactgttatgttctgtcccctccaccccacagtggggccactagggacagaaagcggtcttacggtcagtcgtattccttctcgagttccgtccagttgagcgtgtcactcccagtgtacctgcaagccgagatggctgtgcttggagtcaatcgcatgtaggatggtctccagacaccggggcaccagttttcacgcctaaagcataaacgacgagcagtcatgaaagtcttagtactggacgtgccgtttcacaattaatgacagaaaagccccatccttaggcctcctccttcctagtctcctgatattgggtctaacccccagcataatgagttgtcacacgctcacatgaggatcacccatgtgat

SEQ ID NO: 19189 - RNA, 283 nt, synthetic construct
  source 1..283: mol_type = other RNA
gggataatgagcgtgtgacaagattttgggcttgtgtttcgcaagctttgattaaaatggtagatggatttgctatctatcgtcatttccagtactgttatgttctgtcccctccaccccacagtggggccactagggacagaactcgagctctgaatgactcctataattaatgacagaaaagccccatccttaggcctcctccttcctagtctcctgatattgggtctaacccccagcataatgagttgtcacacgctcacatgaggatcacccatgtgat

SEQ ID NO: 19190 - RNA, 573 nt, synthetic construct
  source 1..573: mol_type = other RNA
gggataatgagcgtgtgacaagattttgggcttgtgtttcgcaagctttgattaaaatggtagatggatttgctatctatcgtcatttccagtactgttatgtacaaacggcagaagctggaggaggaagggcctgagtccgagcagaagaacgactaccaaatccgcatgttacgggacttcttattaattcttttttcgtgaggagcagcggatcttaatggatggccgcaggtggtatggaagctaatagcgcgggtgagagggtaatcagccgtgtccaccaacacaacgctatcgggcgattctataagattccgcattgcgtctacttataagatgtctcaacggtatccgcaacttgcgatgtgcctgctatccttaaatgcatatctcgcccagtagcttcccaatatgagagcatcaattgtagatcgggccgggatagtcatgtcgtaaagttctcccatcacatcaaccggtggcgcattgccacgaagcaggccaatggggaggacatcgatgtcagcataatgagttgtcacacgctcacatgaggatcacccatgtgat

SEQ ID NO: 19191 - RNA, 293 nt, synthetic construct
  source 1..293: mol_type = other RNA
gggataatgagcgtgtgacaagattttgggcttgtgtttcgcaagctttgattaaaatggtagatggatttgctatctatcgtcatttccagtactgttatgtacaaacggcagaagctggaggaggaagggcctgagtccgagcagaagaaaactcgagctctgaatgactcctataaagttctcccatcacatcaaccggtggcgcattgccacgaagcaggccaatggggaggacatcgatgtcagcataatgagttgtcacacgctcacatgaggatcacccatgtgat

SEQ ID NO: 19192 - RNA, 1032 nt, synthetic construct
  source 1..1032: mol_type = other RNA
gggataatgagcgtgtgacaagattttgggcttgtgtttcgcaagctttgattaaaatggtagatggatttgctatctatcgtcatttccagtactgttatgtacaaacggcagaagctggaggaggaagggcctgagtccgagcagaagaaggaagcggagccactaacttctccctgttgaaacaagcaggggatgtcgaagagaatcccgggccagtgagcaagggcgaggagctgttcaccggggtggtgcccatcctggtcgagctggacggcgacgtaaacggccacaagttcagcgtgtccggcgagggcgagggcgatgccacctacggcaagctgaccctgaagttcatctgcaccaccggcaagctgcccgtgccctggcccaccctcgtgaccaccctgacctacggcgtgcagtgcttcagccgctaccccgaccacatgaagcagcacgacttcttcaagtccgccatgcccgaaggctacgtccaggagcgcaccatcttcttcaaggacgacggcaactacaagacccgcgccgaggtgaagttcgagggcgacaccctggtgaaccgcatcgagctgaagggcatcgacttcaaggaggacggcaacatcctggggcacaagctggagtacaactacaacagccacaacgtctatatcatggccgacaagcagaagaacggcatcaaggtgaacttcaagatccgccacaacatcgaggacggcagcgtgcagctcgccgaccactaccagcagaacacccccatcggcgacggccccgtgctgctgcccgacaaccactacctgagcacccagtccgccctgagcaaagaccccaacgagaagcgcgatcacatggtcctgctggagttcgtgaccgccgccgggatcactctcggcatggacgagctgtacaagtagaaagttctcccatcacatcaaccggtggcgcattgccacgaagcaggccaatggggaggacatcgatgtcagcataatgagttgtcacacgctcgat

SEQ ID NO: 19193 - RNA, 564 nt, synthetic construct
  source 1..564: mol_type = other RNA
gggataatggggccactagggacaggatgtttcagagctatgctggaaacagcatagcaagttgaaataaggctagtccgttatcaacttgaaaaagtggcaccgagtcggtgctttttaataacaacgagcgtgtgacaagattttgggcttgtgtttcgcaagctttgattaaaatggtagatggatttgctatctatcgtcatttccagtactgttatgttctgtcccctccaccccacagtggggccactagggacagaaagcggtcttacggtcagtcgtattccttctcgagttccgtccagttgagcgtgtcactcccagtgtacctgcaagccgagatggctgtgcttggagtcaatcgcatgtaggatggtctccagacaccggggcaccagttttcacgcctaaagcataaacgacgagcagtcatgaaagtcttagtactggacgtgccgtttcacaattaatgacagaaaagccccatccttaggcctcctccttcctagtctcctgatattgggtctaacccccagcataatgagttgtcacacgctcgat

SEQ ID NO: 19194 - RNA, 473 nt, synthetic construct
  source 1..473: mol_type = other RNA
gggataatgagcgtgtgacaagattttgggcttgtgtttcgcaagctttgattaaaatggtagatggatttgctatctatcgtcatttccagtactgttatgtacaaacggcagaagctggaggaggaagggcctgagtccgagcagaagaaaaagcggtcttacggtcagtcgtattccttctcgagttccgtccagttgagcgtgtcactcccagtgtacctgcaagccgagatggctgtgcttggagtcaatcgcatgtaggatggtctccagacaccggggcaccagttttcacgcctaaagcataaacgacgagcagtcatgaaagtcttagtactggacgtgccgtttcacaaagttctcccatcacatcaaccggtggcgcattgccacgaagcaggccaatggggaggacatcgatgtcagcataatgagttgtcacacgctcacatgaggatcacccatgtgat

SEQ ID NO: 19195 - RNA, 564 nt, synthetic construct
  source 1..564: mol_type = other RNA
gggataatgagcgtgtgacaagattttgggcttgtgtttcgcaagctttgattaaaatggtagatggatttgctatctatcgtcatttccagtactgttatgttctgtcccctccaccccacagtggggccactagggacagaaagcggtcttacggtcagtcgtattccttctcgagttccgtccagttgagcgtgtcactcccagtgtacctgcaagccgagatggctgtgcttggagtcaatcgcatgtaggatggtctccagacaccggggcaccagttttcacgcctaaagcataaacgacgagcagtcatgaaagtcttagtactggacgtgccgtttcacaattaatgacagaaaagccccatccttaggcctcctccttcctagtctcctgatattgggtctaacccccagcataatgagttgtcacacgctcaataacaacggggccactagggacaggatgtttcagagctatgctggaaacagcatagcaagttgaaataaggctagtccgttatcaacttgaaaaagtggcaccgagtcggtgctttttgat

SEQ ID NO: 19196 - RNA, 673 nt, synthetic construct
  source 1..673: mol_type = other RNA
gggataatgagcgtgtgacaagattttgggcttgtgtttcgcaagctttgattaaaatggtagatggatttgctatctatcgtcatttccagtactgttatgtacaaacggcagaagctggaggaggaagggcctgagtccgagcagaagaactgctaaatccgcgtgataggggatttgaagtttaatcttctatcgcaaggaactgccgatcttaatggatggccggaggtggtatggaagctataagcgcgggtgagagggtaattaggcgtgttcacctacgctacgctaacgggcgattctataagattgcacattgcgtcaactcataagatgtctcaacggcatgcgcaacttgtgaagtgtctactatccttaaacgcatatctcgcacagtaactcccgaatatgtcggcatctgatgttgcccgggccgagttagtgttgagctcacggaacttattgtatgagtagtgatttgtaagagttgtcagttagctcgttcaggtaatagttgcccacacaacgtcaaaataagagaacggtcgtaacataaagttctcccatcacatcaaccggtggcgcattgccacgaagcaggccaatggggaggacatcgatgtcagcataatgagttgtcacacgctcacatgaggatcacccatgtgat

SEQ ID NO: 19197 - RNA, 773 nt, synthetic construct
  source 1..773: mol_type = other RNA
gggataatgagcgtgtgacaagattttgggcttgtgtttcgcaagctttgattaaaatggtagatggatttgctatctatcgtcatttccagtactgttatgtacaaacggcagaagctggaggaggaagggcctgagtccgagcagaagaaacttcagctaaggaagctaccaatatttagtttctgagtctcacgacagacctcgcgcgtagattgccatgcgtagagctaacgagccagcggaaagcgtgaggcgcttttaagcatggcgagtaagtgatccaacgcttcggatatgactatatacttaggttcgatctcgtcccgagaattctaagcctcaacatctatgagttatgaggttagccgaaaaagcacgtggtggcgcccaccgactgttcccagactgtagctctttgttctgtcaaggcccgaccttcatcgcggccgattccttctgcggaccataccgtcctgatactttggtcatgtttccgttgtaggagtgaacccacttgcctttgcgtcttaataccaatgaaaaacctatgcactttgtacagggtaccatcgggattctgaaccctcagatagtggggatcccgggtatagacctttatctgcggtccaacttaggcataaacctccatgctacaaagttctcccatcacatcaaccggtggcgcattgccacgaagcaggccaatggggaggacatcgatgtcagcataatgagttgtcacacgctcacatgaggatcacccatgtgat

SEQ ID NO: 19198 - RNA, 1051 nt, synthetic construct
  source 1..1051: mol_type = other RNA
gggataatgagcgtgtgacaagattttgggcttgtgtttcgcaagctttgattaaaatggtagatggatttgctatctatcgtcatttccagtactgttatgtacaaacggcagaagctggaggaggaagggcctgagtccgagcagaagaaggaagcggagccactaacttctccctgttgaaacaagcaggggatgtcgaagagaatcccgggccagtgagcaagggcgaggagctgttcaccggggtggtgcccatcctggtcgagctggacggcgacgtaaacggccacaagttcagcgtgtccggcgagggcgagggcgatgccacctacggcaagctgaccctgaagttcatctgcaccaccggcaagctgcccgtgccctggcccaccctcgtgaccaccctgacctacggcgtgcagtgcttcagccgctaccccgaccacatgaagcagcacgacttcttcaagtccgccatgcccgaaggctacgtccaggagcgcaccatcttcttcaaggacgacggcaactacaagacccgcgccgaggtgaagttcgagggcgacaccctggtgaaccgcatcgagctgaagggcatcgacttcaaggaggacggcaacatcctggggcacaagctggagtacaactacaacagccacaacgtctatatcatggccgacaagcagaagaacggcatcaaggtgaacttcaagatccgccacaacatcgaggacggcagcgtgcagctcgccgaccactaccagcagaacacccccatcggcgacggccccgtgctgctgcccgacaaccactacctgagcacccagtccgccctgagcaaagaccccaacgagaagcgcgatcacatggtcctgctggagttcgtgaccgccgccgggatcactctcggcatggacgagctgtacaagtagaaagttctcccatcacatcaaccggtggcgcattgccacgaagcaggccaatggggaggacatcgatgtcagcataatgagttgtcacacgctcacatgaggatcacccatgtgat

SEQ ID NO: 19199 - RNA, 1218 nt, synthetic construct
  source 1..1218: mol_type = other RNA
gggataatgagcgtgtgacaagattttgggcttgtgtttcgcaagctttgattaaaatggtagatggatttgctatctatcgtcatttccagtactgttatgtgaggccccagtggctgctctgggggcctcctgagtttctcatctgtgcccctccctccctggcccaggtgaaggtgtggttccagaaccggaggacaaagtacaaacggcagaagctggaggaggaagggcctgagtccgagcagaagaaggaagcggagccactaacttctccctgttgaaacaagcaggggatgtcgaagagaatcccgggccagtgagcaagggcgaggagctgttcaccggggtggtgcccatcctggtcgagctggacggcgacgtaaacggccacaagttcagcgtgtccggcgagggcgagggcgatgccacctacggcaagctgaccctgaagttcatctgcaccaccggcaagctgcccgtgccctggcccaccctcgtgaccaccctgacctacggcgtgcagtgcttcagccgctaccccgaccacatgaagcagcacgacttcttcaagtccgccatgcccgaaggctacgtccaggagcgcaccatcttcttcaaggacgacggcaactacaagacccgcgccgaggtgaagttcgagggcgacaccctggtgaaccgcatcgagctgaagggcatcgacttcaaggaggacggcaacatcctggggcacaagctggagtacaactacaacagccacaacgtctatatcatggccgacaagcagaagaacggcatcaaggtgaacttcaagatccgccacaacatcgaggacggcagcgtgcagctcgccgaccactaccagcagaacacccccatcggcgacggccccgtgctgctgcccgacaaccactacctgagcacccagtccgccctgagcaaagaccccaacgagaagcgcgatcacatggtcctgctggagttcgtgaccgccgccgggatcactctcggcatggacgagctgtacaagtagaaagttctcccatcacatcaaccggtggcgcattgccacgaagcaggccaatggggaggacatcgatgtcacctccaatgactagggtgggcaaccacaaacccacgagggcagagtgctgcttgctgctggccaggcccctgcgtgggcccaagcgcataatgagttgtcacacgctcgat

SEQ ID NO: 19200 - RNA, 1237 nt, synthetic construct
  source 1..1237: mol_type = other RNA
gggataatgagcgtgtgacaagattttgggcttgtgtttcgcaagctttgattaaaatggtagatggatttgctatctatcgtcatttccagtactgttatgtgaggccccagtggctgctctgggggcctcctgagtttctcatctgtgcccctccctccctggcccaggtgaaggtgtggttccagaaccggaggacaaagtacaaacggcagaagctggaggaggaagggcctgagtccgagcagaagaaggaagcggagccactaacttctccctgttgaaacaagcaggggatgtcgaagagaatcccgggccagtgagcaagggcgaggagctgttcaccggggtggtgcccatcctggtcgagctggacggcgacgtaaacggccacaagttcagcgtgtccggcgagggcgagggcgatgccacctacggcaagctgaccctgaagttcatctgcaccaccggcaagctgcccgtgccctggcccaccctcgtgaccaccctgacctacggcgtgcagtgcttcagccgctaccccgaccacatgaagcagcacgacttcttcaagtccgccatgcccgaaggctacgtccaggagcgcaccatcttcttcaaggacgacggcaactacaagacccgcgccgaggtgaagttcgagggcgacaccctggtgaaccgcatcgagctgaagggcatcgacttcaaggaggacggcaacatcctggggcacaagctggagtacaactacaacagccacaacgtctatatcatggccgacaagcagaagaacggcatcaaggtgaacttcaagatccgccacaacatcgaggacggcagcgtgcagctcgccgaccactaccagcagaacacccccatcggcgacggccccgtgctgctgcccgacaaccactacctgagcacccagtccgccctgagcaaagaccccaacgagaagcgcgatcacatggtcctgctggagttcgtgaccgccgccgggatcactctcggcatggacgagctgtacaagtagaaagttctcccatcacatcaaccggtggcgcattgccacgaagcaggccaatggggaggacatcgatgtcacctccaatgactagggtgggcaaccacaaacccacgagggcagagtgctgcttgctgctggccaggcccctgcgtgggcccaagcgcataatgagttgtcacacgctcacatgaggatcacccatgtgat

SEQ ID NO: 19201 - RNA, 2040 nt, synthetic construct
  source 1..2040: mol_type = other RNA
atgagcaaccctcagcccaccagggctgagatcttcgagcgcatcaaacagagctcgaagcaggaggtgatcctggaggagatgcagagactgggcttctggccaaggtcagaaggccagcctgaggtcgctgccgacctcatccagagagaaggcgagctccaaagggagctcgccgaactcaacaagaagttggcggtcaaacgcaaccccgagagggccctcagagaaatgaggaagcagagaatgaaggacgccagagacaagagagaggtgaccaagagagcccaggctcagcagagatacgacaaggccctgctgtggcacgagaagagggccagccacgtggcctatcttggccctggtgtgagcgccagcttacacgagaacagctctgctacccaggagcagggcgacaaggggaaacccaagagagcccgagatcgggctgtgccagacctgcagaggctgacactgaacgggctgcctgctctgattagcgcagcccaactcgctgagtccatgggagtcagcgtggctgagctgagattcctcagcttccacagggaggtggctaggacaaaccactaccacagcttcacgctccccaagaagacaggtggggagcgtctgatcagcgcccccatgcccagactgaagagagcccagtactgggtgctggacaacgtgctggcaaagatgccagcgcacgatgcggctcacggcttcctggccggcagaagcatcatcagcaatgccaagccccatgcggggcaggatgtggtcattaacttggacgttaaggacttcttccccagcatcgccttcggcagaatcaagggcgtgttcagacagctgggctacggcgaaagcatcgccacagtgttcgccctgctgtgcagcgagaacagagcccaggcctggcaagtggacggagagagactcttcgtcggcggcaaggccagagaaagagtgctgcctcagggcgctcctaccagccccatgctgaccaacctgctgtgccggcggatggatagacgtctgctgggtctcgcgaagcagctgggcttcgtgtacaccagatacgccgacgacctgaccttcagcgcctccggcgaacccgcaagggataacgtcggaaagctgctgagcagggtccggtggatcctgagggatgaggggttcacccctcatcccgataaggagagagtgatgagaaagggcagaagacaggaggtgaccggccttgtggtcaactccgacactcccagcgtgagcagggagaccagaagaaggctgagagccgctctgcacagagcctcgcagcctgacgctgcgagcaaacctgcacattggcagggccatacggcccagccaagtcagctgctgggcctggccacattcgtgcatcagatcgaccccaagcagggcaagaccctgctcgctgacgctcagcaactgatgcgcagccctatcgaccgcgctaatgacgcggcgaagtctgctagcagggctgacgctgctcagcagagcttcagagtgctggctgctgccggcaagccaccagttcttgccgacggcaagaactggtggcaacctgctcctcctgccacacctgtgctggagaagaccgaccagcagagaagagaggaaaggcaggctaccagaaggcagcaggccgctgctgctgctcctcctcctagcagcacaagaagaaacgagcggccgcaacaggccgctcatgagcagcagggagatgcccagcctcagaacgaggcccctcctagattcgaccccgaccagtacgctcctcccccgaggaacgtgatgacctactgggcccagatcgccatcagcttctttctgggcagcatcctgcacaacagactgatcacgatcttcgccatggtggcggtgatcgctctgtactacatgagaagacagagatgggatgtcttcatgggcatcctggtggtggccaccctgctgggatacctggtcaggggcatgggcccaccaaagaagaaaagaaaggtctga

SEQ ID NO: 19202 - RNA, 463 nt, synthetic construct
  source 1..463: mol_type = other RNA
gctccggagcaatgagcaggctcttgcaatccgggcggtgtttcgccgcccttgtgaactgccgtttcatgcaccacgggcgccgttttcactgtgccaccccagccacggtagtgcttctgtcccctccaccccacagtggggccactagggacagaaatgacagtggttggtgctctaaaaattaatgacagaaaagccccatccttaggcctcctccttcctagtctcctgatattgggtctaacccccaagcactaccgtggcggggtggcgtcgagcgaacagctcccgtcccctgagccctacaggctcttggacgagatgcacattgctccggagcaataacaacggggccactagggacaggatgtttcagagctatgctggaaacagcatagcaagttgaaataaggctagtccgttatcaacttgaaaaagtggcaccgagtcggtgcttttt

SEQ ID NO: 19203 - RNA, 353 nt, synthetic construct
  source 1..353: mol_type = other RNA
gctccggagcaatgagcaggctcttgcaatccgggcggtgtttcgccgcccttgtgaactgccgtttcatgcaccacgggcgccgttttcactgtgccaccccagccacggtagtgctacaaacggcagaagctggaggaggaagggcctgagtccgagcagaagaaaactcgagctctgaatgactcctataaagttctcccatcacatcaaccggtggcgcattgccacgaagcaggccaatggggaggacatcgatgtcaagcactaccgtggcggggtggcgtcgagcgaacagctcccgtcccctgagccctacaggctcttggacgagatgcacattgctccggagc

SEQ ID NO: 19204 - RNA, 473 nt, synthetic construct
  source 1..473: mol_type = other RNA
gctccggagcaatgagcaggctcttgcaatccgggcggtgtttcgccgcccttgtgaactgccgtttcatgcaccacgggcgccgttttcactgtgccaccccagccacggtagtgctacaaacggcagaagctggaggaggaagggcctgagtccgagcagaagaaaactcgagctctgaatgactcctataaagttctcccatcacatcaaccggtggcgcattgccacgaagcaggccaatggggaggacatcgatgtcaagcactaccgtggcggggtggcgtcgagcgaacagctcccgtcccctgagccctacaggctcttggacgagatgcacattgctccggagcaataacaacgagtccgagcagaagaagaagtttcagagctatgctggaaacagcatagcaagttgaaataaggctagtccgttatcaacttgaaaaagtggcaccgagtcggtgcttttt

SEQ ID NO: 19205 - RNA, 1712 nt, synthetic construct
  source 1..1712: mol_type = other RNA
gctccggagcaatgagcaggctcttgcaatccgggcggtgtttcgccgcccttgtgaactgccgtttcatgcaccacgggcgccgttttcactgtgccaccccagccacggtagtgctacaaacggcagaagctggaggaggaagggcctgagtccgagcagaagaacccatatgtccttccgagtgagagacacaaaaaattccaacacactattgcaatgaaaataaatttcctttattagccagaagtcagatgctcaaggggcttcatgatgtccccataatttttggcagagggaaaaagatctcagtggtatttgtgagccagggcattggccacaccagccaccaccttctgataggcagcctgcacctgaggagtgcggccgctttacttgtacagctcgtccatgccgagagtgatcccggcggcggtcacgaactccagcaggaccatgtgatcgcgcttctcgttggggtctttgctcagggcggactgggtgctcaggtagtggttgtcgggcagcagcacggggccgtcgccgatgggggtgttctgctggtagtggtcggcgagctgcacgctgccgtcctcgatgttgtggcggatcttgaagttcaccttgatgccgttcttctgcttgtcggccatgatatagacgttgtggctgttgtagttgtactccagcttgtgccccaggatgttgccgtcctccttgaagtcgatgcccttcagctcgatgcggttcaccagggtgtcgccctcgaacttcacctcggcgcgggtcttgtagttgccgtcgtccttgaagaagatggtgcgctcctggacgtagccttcgggcatggcggacttgaagaagtcgtgctgcttcatgtggtcggggtagcggctgaagcactgcacgccgtaggtcagggtggtcacgagggtgggccagggcacgggcagcttgccggtggtgcagatgaacttcagggtcagcttgccgtaggtggcatcgccctcgccctcgccggacacgctgaacttgtggccgtttacgtcgccgtccagctcgaccaggatgggcaccaccccggtgaacagctcctcgcccttgctcaccatggtggcgaccggtggatcccgggcccgcggtaccgtcgactgcagaattcgaagcttgagctcgagatctgagtccggtagcgctagcggatctgacggttcactaaaccctgtgttctggcggcaaacccgttgcgaaaaagaacgttcacggcgactactgcacttatatacggttctcccccaccctcgggaaaaaggcggagccagtacacgacatcactttcccagtttaccccgcgccaccttctctaggcaccggttcaattgccgacccctccccccaacttctcggggactgtgggcgatgtgcgctctgcccgttctcccatcacatcaaccggtggcgcattgccacgaagcaggccaatggggaggacatcgatgtcaagcactaccgtggcggggtggcgtcgagcgaacagctcccgtcccctgagccctacaggctcttggacgagatgcacattgctccggagcaataacaacgagtccgagcagaagaagaagtttcagagctatgctggaaacagcatagcaagttgaaataaggctagtccgttatcaacttgaaaaagtggcaccgagtcggtgcttttt

SEQ ID NO: 19206 - RNA, 498 nt, synthetic construct
  source 1..498: mol_type = other RNA
gctccggagcaatgagcaggctcttgcaatccgggcggtgtttcgccgcccttgtgaactgccgtttcatgcaccacgggcgccgttttcactgtgccaccccagccacggtagtgctacaaacggcagaagctggaggaggaagggcctgagtccgagcagaagaaaactcgagctctgatcagtatcatggggcccatggttgaatgactcctataaagttctcccatcacatcaaccggtggcgcattgccacgaagcaggccaatggggaggacatcgatgtcaagcactaccgtggcggggtggcgtcgagcgaacagctcccgtcccctgagccctacaggctcttggacgagatgcacattgctccggagcaataacaacgagtccgagcagaagaagaagtttcagagctatgctggaaacagcatagcaagttgaaataaggctagtccgttatcaacttgaaaaagtggcaccgagtcggtgcttttt

SEQ ID NO: 19207 - RNA, 548 nt, synthetic construct
  source 1..548: mol_type = other RNA
gctccggagcaatgagcaggctcttgcaatccgggcggtgtttcgccgcccttgtgaactgccgtttcatgcaccacgggcgccgttttcactgtgccaccccagccacggtagtgctacaaacggcagaagctggaggaggaagggcctgagtccgagcagaagaaaactcgagctctgagccccactgtcgagaagtatgtatctcgctcccgcagcttgccagcactttcagtatcatggggcccatggttgaatgactcctataaagttctcccatcacatcaaccggtggcgcattgccacgaagcaggccaatggggaggacatcgatgtcaagcactaccgtggcggggtggcgtcgagcgaacagctcccgtcccctgagccctacaggctcttggacgagatgcacattgctccggagcaataacaacgagtccgagcagaagaagaagtttcagagctatgctggaaacagcatagcaagttgaaataaggctagtccgttatcaacttgaaaaagtggcaccgagtcggtgcttttt

SEQ ID NO: 19208 - RNA, 523 nt, synthetic construct
  source 1..523: mol_type = other RNA
gctccggagcaatgagcaggctcttgcaatccgggcggtgtttcgccgcccttgtgaactgccgtttcatgcaccacgggcgccgttttcactgtgccaccccagccacggtagtgctacaaacggcagaagctggaggaggaagggcctgagtccgagcagaagaaaactcgagctctgagccccaccgcagcttgccagcactttcagtatcatggggcccatggttgaatgactcctataaagttctcccatcacatcaaccggtggcgcattgccacgaagcaggccaatggggaggacatcgatgtcaagcactaccgtggcggggtggcgtcgagcgaacagctcccgtcccctgagccctacaggctcttggacgagatgcacattgctccggagcaataacaacgagtccgagcagaagaagaagtttcagagctatgctggaaacagcatagcaagttgaaataaggctagtccgttatcaacttgaaaaagtggcaccgagtcggtgcttttt

SEQ ID NO: 19209 - RNA, 383 nt, synthetic construct
  source 1..383: mol_type = other RNA
gggataatgtataaaaccgggaacgatcagaccggggtgaattcgcccccttgatcaaacggcactaaccactgtttgccgtgcgtgcgtacaaacggcagaagctggaggaggaagggcctgagtccgagcagaagaaaactcgagctctgagccccactgtcgagaagtatgtatctcgctcccgcagcttgccagcactttcagtatcatggggcccatggttgaatgactcctataaagttctcccatcacatcaaccggtggcgcattgccacgaagcaggccaatggggaggacatcgatgtcaacgcacgcacggcaaacagacagatccattattattacaatttatttagtgatcgttcccggttttatacgat

SEQ ID NO: 19210 - RNA, 488 nt, synthetic construct
  source 1..488: mol_type = other RNA
gggataatgtataaaaccgggaacgatcagaccggggtgaattcgcccccttgatcaaacggcactaaccactgtttgccgtgcgtgcgtacaaacggcagaagctggaggaggaagggcctgagtccgagcagaagaaaaagcggtcttacggtcagtcgtattccttctcgagttccgtccagttgagcgtgtcactcccagtgtacctgcaagccgagatggctgtgcttggagtcaatcgcatgtaggatggtctccagacaccggggcaccagttttcacgcctaaagcataaacgacgagcagtcatgaaagtcttagtactggacgtgccgtttcacaaagttctcccatcacatcaaccggtggcgcattgccacgaagcaggccaatggggaggacatcgatgtcaacgcacgcacggcaaacagacagatccattattattacaatttatttagtgatcgttcccggttttatacgat

SEQ ID NO: 19211 - RNA, 502 nt, synthetic construct
  source 1..502: mol_type = other RNA
gggataattgataagattccgtaagagccaaacctagcattttatgggttaatagcccatcgggccatgagtcatggtttcgcctagtattttagctatgcccgtcgttcagttcgctgaacaaacggcagaagctggaggaggaagggcctgagtccgagcagaagaaaaagcggtcttacggtcagtcgtattccttctcgagttccgtccagttgagcgtgtcactcccagtgtacctgcaagccgagatggctgtgcttggagtcaatcgcatgtaggatggtctccagacaccggggcaccagttttcacgcctaaagcataaacgacgagcagtcatgaaagtcttagtactggacgtgccgtttcacaaagttctcccatcacatcaaccggtggcgcattgccacgaagcaggccaatggggaggacatcgatgtcatcagcgaactgatcgacgtgctcaagtaggtttggctcttacggaatcttatcagat

SEQ ID NO: 19212 - DNA, 55 bp, synthetic construct
  source 1..55: mol_type = other DNA
tcgtcggcagcgtcagatgtgtataagagacagagctgggaccaccttatattcc

SEQ ID NO: 19213 - DNA, 55 bp, synthetic construct
  source 1..55: mol_type = other DNA
gtctcgtgggctcggagatgtgtataagagacaggttctggcaaggagagagatg

SEQ ID NO: 19214 - DNA, 53 bp, synthetic construct
  source 1..53: mol_type = other DNA
tcgtcggcagcgtcagatgtgtataagagacagaggtgaaggtgtggttccag

SEQ ID NO: 19215 - DNA, 55 bp, synthetic construct
  source 1..55: mol_type = other DNA
gtctcgtgggctcggagatgtgtataagagacagtagtcattggaggtgacatcg

SEQ ID NO: 19216 - DNA, 53 bp, synthetic construct; identical to SEQ ID NO: 19214
  source 1..53: mol_type = other DNA

SEQ ID NO: 19217 - DNA, 52 bp, synthetic construct
  source 1..52: mol_type = other DNA
gtctcgtgggctcggagatgtgtataagagacaggccagagtccagcttggg

SEQ ID NO: 19218 - DNA, 20 bp, synthetic construct
  source 1..20: mol_type = other DNA
aggtgaaggtgtggttccag

SEQ ID NO: 19219 - DNA, 21 bp, synthetic construct
  source 1..21: mol_type = other DNA
tagtcattggaggtgacatcg

SEQ ID NO: 19220 - DNA, 20 bp, synthetic construct
  source 1..20: mol_type = other DNA
ccccttgagcatctgacttc

SEQ ID NO: 19221 - DNA, 21 bp, synthetic construct
  source 1..21: mol_type = other DNA
catcactttcccagtttaccc

SEQ ID NO: 19222 - DNA, 1512 bp, synthetic construct
  source 1..1512: mol_type = other DNA
atgatggagaatcaggagaacaacatgaacaacagaaagaactacagagaggccgtgaacaccatgggcaagaaggaattcaccctgatcaagatgcaggagtacggcttctggcccaagaacctgcctactccctacgagaggcaggaaagcgagaccgaggagcagtacaaggagagaaagtgcctgctcgagaagtacgagaaggtgatcgacgagatcagcaagctgtacgaagagaaggacaagatcaacctgaagctgagggagctccagaagaagtacgacgagacctgggactatgagcgcatccggctggatgtgagcaagaccatcatgcaggagagcatcgagaggagagctgaaagaaagcgccagcgggagctggagaaggagcagcgctccgaggagtggaagaaggagaaggagaacaagatcgtcttcatcggcaaggggtacagcagcctgctgtacgacaaggagaccgacgagaacaagctgctgctgcaggagctccctatcatcaaggatgataaggagctggccaacttcctgggcatcgagtacaagaagctgagattcctggtgtaccaccgggacgtgatctccgtggacaactaccacagatacaccatccccaagaagaagggcggcgtgagaaacatcgccgctcccaagagcatcctgaagaactcccagaggattatcctcgaggagattctgagcaagatccccacctccaactacagccacggcttcctgaaggggaagtccgtggtgagcgccgccaaggtgcacgtgaagaaacccgacctcctgatcaacatcgatctggaggacttcttccccaccatcaccttcgagagggtgagaggcatgttcaagagcttcggctacagcggatacgtggccagcatgctggccatgatctgcacctactgcgagaggatgaaggtggaggtgaggggcgaggagaagtacgtcaagatcagcgacagaattctgccccagggcagccctgccagccccatgatcaccaacatcatctgcgtgaagctggacaagagactgaacggcctgagcaccaagtatgacttcatttatactcggtacgctgacgacatgtcgttcagcttcaccggcgacatcaacgaactgagcgtcggcagcttcatgggcctggtgagcaagatcgtgaaggaagagggcttcaacatcaacaaggacaagaccaagttcctgagaaagaacaacagacagtgcatcaccggcatcgtgatcaacaacgaggagatcggcgtgcccaagaagtggatcaagatcctgagagccgccatctacaacgccaacaaggtgaagaacagcggcgagatcctgagcaacaaggtgatcaaggagatcagcggcatgacctcctgggtgaagtccgtcaacgaggagagatacaaggacatcatcaacgatgccatgaacctgatcaacaacccaccaaagaagaaaagaaaggtctga

SEQ ID NO: 19223 - DNA, 1512 bp, synthetic construct
  source 1..1512: mol_type = other DNA
atgatggagaatcaggagaacaacatgaacaacagaaagaactacagagaggccgtgaacaccatgggcaagaaggaattcaccctgatcaagatgcaggagtacggcttctggcccaagaacctgcctactccctacgagaggcaggaaagcgagaccgaggagcagtacaaggagagaaagtgcctgctcgagaagtacgagaaggtgatcgacgagatcagcaagctgtacgaagagaaggacaagatcaacctgaagctgagggagctccagaagaagtacgacgagacctgggactatgagcgcatccggctggatgtgagcaagaccatcatgcaggagagcatcgagaggagagctgaaagaaagcgccagcgggagctggagaaggagcagcgctccgaggagtggaagaaggagaaggagaacaagatcgtcttcatcggcaaggggtacagcagcctgctgtacgacaaggagaccgacgagaacaagctgctgctgcaggagctccctatcatcaaggatgataaggagctggccaacttcctgggcatcgagtacaagaagctgagattcctggtgtaccaccgggacgtgatctccgtggacaactaccacagatacaccatccccaagaagaagggcggcgtgagaaacatcgccgctcccaagagcatcctgaagaactcccagaggattatcctcgaggagattctgagcaagatccccacctccaactacagccacggcttcctgaaggggaagtccgtggtgagcgccgccaaggtgcacgtgaagaaacccgacctcctgatcaacatcgatctggaggacttcttccccaccatcaccttcgagagggtgagaggcatgttcaagagcttcggctacagcggatacgtggccagcatgctggccatgatctgcacctactgcgagaggatgaaggtggaggtgaggggcgaggagaagtacgtcaagatcagcgacagaattctgccccagggcagccctgccagccccatgatcaccaacatcatctgcgtgaagctggacaagagactgaacggcctgagcaccaagtatgacttcatttatactcggtacgctgacgacatgtcgttcagcttcaccggcgacatcaacgaactgagcgtcggcagcttcatgggcctggtgagcaagatcgtgaaggaagagggcttcaacatcaacaaggacaagaccaagttcctgagaaagaacaacagacagtgcatcaccggcatcgtgatcaacaacgaggagatcggcgtgcccaagaagtggatcaagatcctgagagccgccatctacaacgccaacaaggtgaagaacagcggcgagatcctgagcaacaaggtgatccaggagatcagcggcatgacctcctgggtgaagtccgtcaacgaggagagatacaaggacatcatcaacgatgccatgaacctgatcaacaacccaccaaagaagaaaagaaaggtctga

SEQ ID NO: 19224 - DNA, 1512 bp, synthetic construct
  source 1..1512: mol_type = other DNA
atgatggagaatcaggagaacaacatgaacaacagaaagaactacagagaggccgtgaacaccatgggcaagaaggaattcaccctgatcaagatgcaggagtacggcttctggcccaagaacctgcctactccctacgagaggcaggaaagcgagaccgaggagcagtacaaggagagaaagtgcctgctcgagaagtacgagaaggtgatcgacgagatcagcaagctgtacgaagagaaggacaagatcaacctgaagctgagggagctccagaagaagtacgacgagacctgggactatgagcgcatccggctggatgtgagcaagaccatcatgcaggagagcatcgagaggagagctgaaagaaagcgccagcgggagctggagaaggagcagcgctccgaggagtggaagaaggagaaggagaacaagatcgtcttcatcggcaaggggtacagcagcctgctgtacgacaaggagaccgacgagaacaagctgctgctgcaggagctccctatcatcaaggatgataaggagctggccaacttcctgggcatcgagtacaagaagctgagattcctggtgtaccaccgggacgtgatctccgtggacaactaccacagatacaccatccccaagaagaagggcggcgtgagaaacatcgccgctcccaagagcatcctgaagaactcccagaggattatcctcgaggagattctgagcaagatccccacctccaactacagccacggcttcctgaaggggaagtccgtggtgagcgccgccaaggtgcacgtgaagaaacccgacctcctgatcaacatcgatctggaggacttcttccccaccatcaccttcgagagggtgagaggcatgttcaagagcttcggctacagcggatacgtggccagcatgctggccatgatctgcacctactgcgagaggatgaaggtggaggtgaggggcgaggagaagtacgtcaagatcagcgacagaattctgccccagggcagccctgccagccccatgatcaccaacatcatctgcgtgaagctggacaagagactgaacggcctgagcaccaagtatgacttcatttatactcggtacgctgacgacatgtcgttcagcttcaccggcgacatcaacgaactgagcgtcggcagcttcatgggcctggtgagcaagatcgtgaaggaagagggcttcaacatcaacaaggacaagaccaagttcctgagaaagaacaacagacagtgcatcaccggcatcgtgatcaacaacgaggagatcggcgtgcccaagaagtggatcaagatcctgagagccgccatctacaacgccaacaaggtgaagaacagcggcgagatcctgagcaacaaggtgatccgggagatcagcggcatgacctcctgggtgaagtccgtcaacgaggagagatacaaggacatcatcaacgatgccatgaacctgatcaacaacccaccaaagaagaaaagaaaggtctga

SEQ ID NO: 19225 - DNA, 1512 bp, synthetic construct
  source 1..1512: mol_type = other DNA
atgatggagaatcaggagaacaacatgaacaacagaaagaactacagagaggccgtgaacaccatgggcaagaaggaattcaccctgatcaagatgcaggagtacggcttctggcccaagaacctgcctactccctacgagaggcaggaaagcgagaccgaggagcagtacaaggagagaaagtgcctgctcgagaagtacgagaaggtgatcgacgagatcagcaagctgtacgaagagaaggacaagatcaacctgaagctgagggagctccagaagaagtacgacgagacctgggactatgagcgcatccggctggatgtgagcaagaccatcatgcaggagagcatcgagaggagagctgaaagaaagcgccagcgggagctggagaaggagcagcgctccgaggagtggaagaaggagaaggagaacaagatcgtcttcatcggcaaggggtacagcagcctgctgtacgacaaggagaccgacgagaacaagctgctgctgcaggagctccctatcatcaaggatgataaggagctggccaacttcctgggcatcgagtacaagaagctgagattcctggtgtaccaccgggacgtgatctccgtggacaactaccacagatacaccatccccaagaagaagggcggcgtgagaaacatcgccgctcccaagagcatcctgaagaactcccagaggattatcctcgaggagattctgagcaagatccccacctccaactacagccacggcttcctgaaggggaagtccgtggtgagcgccgccaaggtgcacgtgaagaaacccgacctcctgatcaacatcgatctggaggacttcttccccaccatcaccttcgagagggtgagaggcatgttcaagagcttcggctacagcggatacgtggccagcatgctggccatgatctgcacctactgcgagaggatgaaggtggaggtgaggggcgaggagaagtacgtcaagatcagcgacagaattctgccccagggcagccctgccagccccatgatcaccaacatcatctgcgtgaagctggacaagagactgaacggcctgagcaccaagtatgacttcatttatactcggtacgctgacgacatgtcgttcagcttcaccggcgacatcaacgaactgagcgtcggcagcttcatgggcctggtgagcaagatcgtgaaggaagagggcttcaacatcaacaaggacaagaccaagttcctgagaaagaacaacagacagtgcatcaccggcatcgtgatcaacaacgaggagatcggcgtgcccaagaagtggatcaagatcctgagagccgccatctacaacgccaacaaggtgaagaacagcggcgagatcctgagcaacaaggtgatcaacaagatcagcggcatgacctcctgggtgaagtccgtcaacgaggagagatacaaggacatcatcaacgatgccatgaacctgatcaacaacccaccaaagaagaaaagaaaggtctga

SEQ ID NO: 19226 - DNA, 1512 bp, synthetic construct
  source 1..1512: mol_type = other DNA
atgatggagaatcaggagaacaacatgaacaacagaaagaactacagagaggccgtgaacaccatgggcaagaaggaattcaccctgatcaagatgcaggagtacggcttctggcccaagaacctgcctactccctacgagaggcaggaaagcgagaccgaggagcagtacaaggagagaaagtgcctgctcgagaagtacgagaaggtgatcgacgagatcagcaagctgtacgaagagaaggacaagatcaacctgaagctgagggagctccagaagaagtacgacgagacctgggactatgagcgcatccggctggatgtgagcaagaccatcatgcaggagagcatcgagaggagagctgaaagaaagcgccagcgggagctggagaaggagcagcgctccgaggagtggaagaaggagaaggagaacaagatcgtcttcatcggcaaggggtacagcagcctgctgtacgacaaggagaccgacgagaacaagctgctgctgcaggagctccctatcatcaaggatgataaggagctggccaacttcctgggcatcgagtacaagaagctgagattcctggtgtaccaccgggacgtgatctccgtggacaactaccacagatacaccatccccaagaagaagggcggcgtgagaaacatcgccgctcccaagagcatcctgaagaactcccagaggattatcctcgaggagattctgagcaagatccccacctccaactacagccacggcttcctgaaggggaagtccgtggtgagcgccgccaaggtgcacgtgaagaaacccgacctcctgatcaacatcgatctggaggacttcttccccaccatcaccttcgagagggtgagaggcatgttcaagagcttcggctacagcggatacgtggccagcatgctggccatgatctgcacctactgcgagaggatgaaggtggaggtgaggggcgaggagaagtacgtcaagatcagcgacagaattctgccccagggcagccctgccagccccatgatcaccaacatcatctgcgtgaagctggacaagagactgaacggcctgagcaccaagtatgacttcatttatactcggtacgctgacgacatgtcgttcagcttcaccggcgacatcaacgaactgagcgtcggcagcttcatgggcctggtgagcaagatcgtgaaggaagagggcttcaacatcaacaaggacaagaccaagttcctgagaaagaacaacagacagtgcatcaccggcatcgtgatcaacaacgaggagatcggcgtgcccaagaagtggatcaagatcctgagagccgccatctacaacgccaacaaggtgaagaacagcggcgagatcctgagcaacaaggtgatcaacaacatcagcggcatgacctcctgggtgaagtccgtcaacgaggagagatacaaggacatcatcaacgatgccatgaacctgatcaacaacccaccaaagaagaaaagaaaggtctga

SEQ ID NO: 19227 - DNA, 1512 bp, synthetic construct
  source 1..1512: mol_type = other DNA
atgatggagaatcaggagaacaacatgaacaacagaaagaactacagagaggccgtgaacaccatgggcaagaaggaattcaccctgatcaagatgcaggagtacggcttctggcccaagaacctgcctactccctacgagaggcaggaaagcgagaccgaggagcagtacaaggagagaaagtgcctgctcgagaagtacgagaaggtgatcgacgagatcagcaagctgtacgaagagaaggacaagatcaacctgaagctgagggagctccagaagaagtacgacgagacctgggactatgagcgcatccggctggatgtgagcaagaccatcatgcaggagagcatcgagaggagagctgaaagaaagcgccagcgggagctggagaaggagcagcgctccgaggagtggaagaaggagaaggagaacaagatcgtcttcatcggcaaggggtacagcagcctgctgtacgacaaggagaccgacgagaacaagctgctgctgcaggagctccctatcatcaaggatgataaggagctggccaacttcctgggcatcgagtacaagaagctgagattcctggtgtaccaccgggacgtgatctccgtggacaactaccacagatacaccatccccaagaagaagggcggcgtgagaaacatcgccgctcccaagagcatcctgaagaactcccagaggattatcctcgaggagattctgagcaagatccccacctccaactacagccacggcttcctgaaggggaagtccgtggtgagcgccgccaaggtgcacgtgaagaaacccgacctcctgatcaacatcgatctggaggacttcttccccaccatcaccttcgagagggtgagaggcatgttcaagagcttcggctacagcggatacgtggccagcatgctggccatgatctgcacctactgcgagaggatgaaggtggaggtgaggggcgaggagaagtacgtcaagatcagcgacagaattctgccccagggcagccctgccagccccatgatcaccaacatcatctgcgtgaagctggacaagagactgaacggcctgagcaccaagtatgacttcatttatactcggtacgctgacgacatgtcgttcagcttcaccggcgacatcaacgaactgagcgtcggcagcttcatgggcctggtgagcaagatcgtgaaggaagagggcttcaacatcaacaaggacaagaccaagttcctgagaaagaacaacagacagtgcatcaccggcatcgtgatcaacaacgaggagatcggcgtgcccaagaagtggatcaagatcctgagagccgccatctacaacgccaacaaggtgaagaacagcggcgagatcctgagcaacaaggtgatcaaccagatcagcggcatgacctcctgggtgaagtccgtcaacgaggagagatacaaggacatcatcaacgatgccatgaacctgatcaacaacccaccaaagaagaaaagaaaggtctga

SEQ ID NO: 19228 - DNA, 1512 bp, synthetic construct
  source 1..1512: mol_type = other DNA
atgatggagaatcaggagaacaacatgaacaacagaaagaactacagagaggccgtgaacaccatgggcaagaaggaattcaccctgatcaagatgcaggagtacggcttctggcccaagaacctgcctactccctacgagaggcaggaaagcgagaccgaggagcagtacaaggagagaaagtgcctgctcgagaagtacgagaaggtgatcgacgagatcagcaagctgtacgaagagaaggacaagatcaacctgaagctgagggagctccagaagaagtacgacgagacctgggactatgagcgcatccggctggatgtgagcaagaccatcatgcaggagagcatcgagaggagagctgaaagaaagcgccagcgggagctggagaaggagcagcgctccgaggagtggaagaaggagaaggagaacaagatcgtcttcatcggcaaggggtacagcagcctgctgtacgacaaggagaccgacgagaacaagctgctgctgcaggagctccctatcatcaaggatgataaggagctggccaacttcctgggcatcgagtacaagaagctgagattcctggtgtaccaccgggacgtgatctccgtggacaactaccacagatacaccatccccaagaagaagggcggcgtgagaaacatcgccgctcccaagagcatcctgaagaactcccagaggattatcctcgaggagattctgagcaagatccccacctccaactacagccacggcttcctgaaggggaagtccgtggtgagcgccgccaaggtgcacgtgaagaaacccgacctcctgatcaacatcgatctggaggacttcttccccaccatcaccttcgagagggtgagaggcatgttcaagagcttcggctacagcggatacgtggccagcatgctggccatgatctgcacctactgcgagaggatgaaggtggaggtgaggggcgaggagaagtacgtcaagatcagcgacagaattctgccccagggcagccctgccagccccatgatcaccaacatcatctgcgtgaagctggacaagagactgaacggcctgagcaccaagtatgacttcatttatactcggtacgctgacgacatgtcgttcagcttcaccggcgacatcaacgaactgagcgtcggcagcttcatgggcctggtgagcaagatcgtgaaggaagagggcttcaacatcaacaaggacaagaccaagttcctgagaaagaacaacagacagtgcatcaccggcatcgtgatcaacaacgaggagatcggcgtgcccaagaagtggatcaagatcctgagagccgccatctacaacgccaacaaggtgaagaacagcggcgagatcctgagcaacaaggtgatcaaccggatcagcggcatgacctcctgggtgaagtccgtcaacgaggagagatacaaggacatcatcaacgatgccatgaacctgatcaacaacccaccaaagaagaaaagaaaggtctga

SEQ ID NO: 19229 - DNA, 1512 bp, synthetic construct
  source 1..1512: mol_type = other DNA
atgatggagaatcaggagaacaacatgaacaacagaaagaactacagagaggccgtgaacaccatgggcaagaaggaattcaccctgatcaagatgcaggagtacggcttctggcccaagaacctgcctactccctacgagaggcaggaaagcgagaccgaggagcagtacaaggagagaaagtgcctgctcgagaagtacgagaaggtgatcgacgagatcagcaagctgtacgaagagaaggacaagatcaacctgaagctgagggagctccagaagaagtacgacgagacctgggactatgagcgcatccggctggatgtgagcaagaccatcatgcaggagagcatcgagaggagagctgaaagaaagcgccagcgggagctggagaaggagcagcgctccgaggagtggaagaaggagaaggagaacaagatcgtcttcatcggcaaggggtacagcagcctgctgtacgacaaggagaccgacgagaacaagctgctgctgcaggagctccctatcatcaaggatgataaggagctggccaacttcctgggcatcgagtacaagaagctgagattcctggtgtaccaccgggacgtgatctccgtggacaactaccacagatacaccatccccaagaagaagggcggcgtgagaaacatcgccgctcccaagagcatcctgaagaactcccagaggattatcctcgaggagattctgagcaagatccccacctccaactacagccacggcttcctgaaggggaagtccgtggtgagcgccgccaaggtgcacgtgaagaaacccgacctcctgatcaacatcgatctggaggacttcttccccaccatcaccttcgagagggtgagaggcatgttcaagagcttcggctacagcggatacgtggccagcatgctggccatgatctgcacctactgcgagaggatgaaggtggaggtgaggggcgaggagaagtacgtcaagatcagcgacagaattctgccccagggcagccctgccagccccatgatcaccaacatcatctgcgtgaagctggacaagagactgaacggcctgagcaccaagtatgacttcatttatactcggtacgctgacgacatgtcgttcagcttcaccggcgacatcaacgaactgagcgtcggcagcttcatgggcctggtgagcaagatcgtgaaggaagagggcttcaacatcaacaaggacaagaccaagttcctgagaaagaacaacagacagtgcatcaccggcatcgtgatcaacaacgaggagatcggcgtgcccaagaagtggatcaagatcctgagagccgccatctacaacgccaacaaggtgaagaacagcggcgagatcctgagcaacaaggtgatcaacgagatcaagggcatgacctcctgggtgaagtccgtcaacgaggagagatacaaggacatcatcaacgatgccatgaacctgatcaacaacccaccaaagaagaaaagaaaggtctga

SEQ ID NO: 19230 - DNA, 1512 bp, synthetic construct
  source 1..1512: mol_type = other DNA
atgatggagaatcaggagaacaacatgaacaacagaaagaactacagagaggccgtgaacaccatgggcaagaaggaattcaccctgatcaagatgcaggagtacggcttctggcccaagaacctgcctactccctacgagaggcaggaaagcgagaccgaggagcagtacaaggagagaaagtgcctgctcgagaagtacgagaaggtgatcgacgagatcagcaagctgtacgaagagaaggacaagatcaacctgaagctgagggagctccagaagaagtacgacgagacctgggactatgagcgcatccggctggatgtgagcaagaccatcatgcaggagagcatcgagaggagagctgaaagaaagcgccagcgggagctggagaaggagcagcgctccgaggagtggaagaaggagaaggagaacaagatcgtcttcatcggcaaggggtacagcagcctgctgtacgacaaggagaccgacgagaacaagctgctgctgcaggagctccctatcatcaaggatgataaggagctggccaacttcctgggcatcgagtacaagaagctgagattcctggtgtaccaccgggacgtgatctccgtggacaactaccacagatacaccatccccaagaagaagggcggcgtgagaaacatcgccgctcccaagagcatcctgaagaactcccagaggattatcctcgaggagattctgagcaagatccccacctccaactacagccacggcttcctgaaggggaagtccgtggtgagcgccgccaaggtgcacgtgaagaaacccgacctcctgatcaacatcgatctggaggacttcttccccaccatcaccttcgagagggtgagaggcatgttcaagagcttcggctacagcggatacgtggccagcatgctggccatgatctgcacctactgcgagaggatgaaggtggaggtgaggggcgaggagaagtacgtcaagatcagcgacagaattctgccccagggcagccctgccagccccatgatcaccaacatcatctgcgtgaagctggacaagagactgaacggcctgagcaccaagtatgacttcatttatactcggtacgctgacgacatgtcgttcagcttcaccggcgacatcaacgaactgagcgtcggcagcttcatgggcctggtgagcaagatcgtgaaggaagagggcttcaacatcaacaaggacaagaccaagttcctgagaaagaacaacagacagtgcatcaccggcatcgtgatcaacaacgaggagatcggcgtgcccaagaagtggatcaagatcctgagagccgccatctacaacgccaacaaggtgaagaacagcggcgagatcctgagcaacaaggtgatcaacgagatcaacggcatgacctcctgggtgaagtccgtcaacgaggagagatacaaggacatcatcaacgatgccatgaacctgatcaacaacccaccaaagaagaaaagaaaggtctga

SEQ ID NO: 19231 - DNA, 1512 bp, synthetic construct
  source 1..1512: mol_type = other DNA
atgatggagaatcaggagaacaacatgaacaacagaaagaactacagagaggccgtgaacaccatgggcaagaaggaattcaccctgatcaagatgcaggagtacggcttctggcccaagaacctgcctactccctacgagaggcaggaaagcgagaccgaggagcagtacaaggagagaaagtgcctgctcgagaagtacgagaaggtgatcgacgagatcagcaagctgtacgaagagaaggacaagatcaacctgaagctgagggagctccagaagaagtacgacgagacctgggactatgagcgcatccggctggatgtgagcaagaccatcatgcaggagagcatcgagaggagagctgaaagaaagcgccagcgggagctggagaaggagcagcgctccgaggagtggaagaaggagaaggagaacaagatcgtcttcatcggcaaggggtacagcagcctgctgtacgacaaggagaccgacgagaacaagctgctgctgcaggagctccctatcatcaaggatgataaggagctggccaacttcctgggcatcgagtacaagaagctgagattcctggtgtaccaccgggacgtgatctccgtggacaactaccacagatacaccatccccaagaagaagggcggcgtgagaaacatcgccgctcccaagagcatcctgaagaactcccagaggattatcctcgaggagattctgagcaagatccccacctccaactacagccacggcttcctgaaggggaagtccgtggtgagcgccgccaaggtgcacgtgaagaaacccgacctcctgatcaacatcgatctggaggacttcttccccaccatcaccttcgagagggtgagaggcatgttcaagagcttcggctacagcggatacgtggccagcatgctggccatgatctgcacctactgcgagaggatgaaggtggaggtgaggggcgaggagaagtacgtcaagatcagcgacagaattctgccccagggcagccctgccagccccatgatcaccaacatcatctgcgtgaagctggacaagagactgaacggcctgagcaccaagtatgacttcatttatactcggtacgctgacgacatgtcgttcagcttcaccggcgacatcaacgaactgagcgtcggcagcttcatgggcctggtgagcaagatcgtgaaggaagagggcttcaacatcaacaaggacaagaccaagttcctgagaaagaacaacagacagtgcatcaccggcatcgtgatcaacaacgaggagatcggcgtgcccaagaagtggatcaagatcctgagagccgccatctacaacgccaacaaggtgaagaacagcggcgagatcctgagcaacaaggtgatcaacgagatccagggcatgacctcctgggtgaagtccgtcaacgaggagagatacaaggacatcatcaacgatgccatgaacctgatcaacaacccaccaaagaagaaaagaaaggtctga

SEQ ID NO: 19232 - DNA, 1512 bp, synthetic construct
  source 1..1512: mol_type = other DNA
atgatggagaatcaggagaacaacatgaacaacagaaagaactacagagaggccgtgaacaccatgggcaagaaggaattcaccctgatcaagatgcaggagtacggcttctggcccaagaacctgcctactccctacgagaggcaggaaagcgagaccgaggagcagtacaaggagagaaagtgcctgctcgagaagtacgagaaggtgatcgacgagatcagcaagctgtacgaagagaaggacaagatcaacctgaagctgagggagctccagaagaagtacgacgagacctgggactatgagcgcatccggctggatgtgagcaagaccatcatgcaggagagcatcgagaggagagctgaaagaaagcgccagcgggagctggagaaggagcagcgctccgaggagtggaagaaggagaaggagaacaagatcgtcttcatcggcaaggggtacagcagcctgctgtacgacaaggagaccgacgagaacaagctgctgctgcaggagctccctatcatcaaggatgataaggagctggccaacttcctgggcatcgagtacaagaagctgagattcctggtgtaccaccgggacgtgatctccgtggacaactaccacagatacaccatccccaagaagaagggcggcgtgagaaacatcgccgctcccaagagcatcctgaagaactcccagaggattatcctcgaggagattctgagcaagatccccacctccaactacagccacggcttcctgaaggggaagtccgtggtgagcgccgccaaggtgcacgtgaagaaacccgacctcctgatcaacatcgatctggaggacttcttccccaccatcaccttcgagagggtgagaggcatgttcaagagcttcggctacagcggatacgtggccagcatgctggccatgatctgcacctactgcgagaggatgaaggtggaggtgaggggcgaggagaagtacgtcaagatcagcgacagaattctgccccagggcagccctgccagccccatgatcaccaacatcatctgcgtgaagctggacaagagactgaacggcctgagcaccaagtatgacttcatttatactcggtacgctgacgacatgtcgttcagcttcaccggcgacatcaacgaactgagcgtcggcagcttcatgggcctggtgagcaagatcgtgaaggaagagggcttcaacatcaacaaggacaagaccaagttcctgagaaagaacaacagacagtgcatcaccggcatcgtgatcaacaacgaggagatcggcgtgcccaagaagtggatcaagatcctgagagccgccatctacaacgccaacaaggtgaagaacagcggcgagatcctgagcaacaaggtgatcaacgagatccggggcatgacctcctgggtgaagtccgtcaacgaggagagatacaaggacatcatcaacgatgccatgaacctgatcaacaacccaccaaagaagaaaagaaaggtctga

SEQ ID NO: 19233 - DNA, 1512 bp, synthetic construct
  source 1..1512: mol_type = other DNA
atgatggagaatcaggagaacaacatgaacaacagaaagaactacagagaggccgtgaacaccatgggcaagaaggaattcaccctgatcaagatgcaggagtacggcttctggcccaagaacctgcctactccctacgagaggcaggaaagcgagaccgaggagcagtacaaggagagaaagtgcctgctcgagaagtacgagaaggtgatcgacgagatcagcaagctgtacgaagagaaggacaagatcaacctgaagctgagggagctccagaagaagtacgacgagacctgggactatgagcgcatccggctggatgtgagcaagaccatcatgcaggagagcatcgagaggagagctgaaagaaagcgccagcgggagctggagaaggagcagcgctccgaggagtggaagaaggagaaggagaacaagatcgtcttcatcggcaaggggtacagcagcctgctgtacgacaaggagaccgacgagaacaagctgctgctgcaggagctccctatcatcaaggatgataaggagctggccaacttcctgggcatcgagtacaagaagctgagattcctggtgtaccaccgggacgtgatctccgtggacaactaccacagatacaccatccccaagaagaagggcggcgtgagaaacatcgccgctcccaagagcatcctgaagaactcccagaggattatcctcgaggagattctgagcaagatccccacctccaactacagccacggcttcctgaaggggaagtccgtggtgagcgccgccaaggtgcacgtgaagaaacccgacctcctgatcaacatcgatctggaggacttcttccccaccatcaccttcgagagggtgagaggcatgttcaagagcttcggctacagcggatacgtggccagcatgctggccatgatctgcacctactgcgagaggatgaaggtggaggtgaggggcgaggagaagtacgtcaagatcagcgacagaattctgccccagggcagccctgccagccccatgatcaccaacatcatctgcgtgaagctggacaagagactgaacggcctgagcaccaagtatgacttcatttatactcggtacgctgacgacatgtcgttcagcttcaccggcgacatcaacgaactgagcgtcggcagcttcatgggcctggtgagcaagatcgtgaaggaagagggcttcaacatcaacaaggacaagaccaagttcctgagaaagaacaacagacagtgcatcaccggcatcgtgatcaacaacgaggagatcggcgtgcccaagaagtggatcaagatcctgagagccgccatctacaacgccaacaaggtgaagaacagcggcgagatcctgagcaacaaggtgatcaacgagatcagcggcaagacctcctgggtgaagtccgtcaacgaggagagatacaaggacatcatcaacgatgccatgaacctgatcaacaacccaccaaagaagaaaagaaaggtctga

SEQ ID NO: 19234 - DNA, 1512 bp, synthetic construct
  source 1..1512: mol_type = other DNA
atgatggagaatcaggagaacaacatgaacaacagaaagaactacagagaggccgtgaacaccatgggcaagaaggaattcaccctgatcaagatgcaggagtacggcttctggcccaagaacctgcctactccctacgagaggcaggaaagcgagaccgaggagcagtacaaggagagaaagtgcctgctcgagaagtacgagaaggtgatcgacgagatcagcaagctgtacgaagagaaggacaagatcaacctgaagctgagggagctccagaagaagtacgacgagacctgggactatgagcgcatccggctggatgtgagcaagaccatcatgcaggagagcatcgagaggagagctgaaagaaagcgccagcgggagctggagaaggagcagcgctccgaggagtggaagaaggagaaggagaacaagatcgtcttcatcggcaaggggtacagcagcctgctgtacgacaaggagaccgacgagaacaagctgctgctgcaggagctccctatcatcaaggatgataaggagctggccaacttcctgggcatcgagtacaagaagctgagattcctggtgtaccaccgggacgtgatctccgtggacaactaccacagatacaccatccccaagaagaagggcggcgtgagaaacatcgccgctcccaagagcatcctgaagaactcccagaggattatcctcgaggagattctgagcaagatccccacctccaactacagccacggcttcctgaaggggaagtccgtggtgagcgccgccaaggtgcacgtgaagaaacccgacctcctgatcaacatcgatctggaggacttcttccccaccatcaccttcgagagggtgagaggcatgttcaagagcttcggctacagcggatacgtggccagcatgctggccatgatctgcacctactgcgagaggatgaaggtggaggtgaggggcgaggagaagtacgtcaagatcagcgacagaattctgccccagggcagccctgccagccccatgatcaccaacatcatctgcgtgaagctggacaagagactgaacggcctgagcaccaagtatgacttcatttatactcggtacgctgacgacatgtcgttcagcttcaccggcgacatcaacgaactgagcgtcggcagcttcatgggcctggtgagcaagatcgtgaaggaagagggcttcaacatcaacaaggacaagaccaagttcctgagaaagaacaacagacagtgcatcaccggcatcgtgatcaacaacgaggagatcggcgtgcccaagaagtggatcaagatcctgagagccgccatctacaacgccaacaaggtgaagaacagcggcgagatcctgagcaacaaggtgatcaacgagatcagcggcaacacctcctgggtgaagtccgtcaacgaggagagatacaaggacatcatcaacgatgccatgaacctgatcaacaacccaccaaagaagaaaagaaaggtctga

SEQ ID NO: 19235 - DNA, 1512 bp, synthetic construct
  source 1..1512: mol_type = other DNA
atgatggagaatcaggagaacaacatgaacaacagaaagaactacagagaggccgtgaacaccatgggcaagaaggaattcaccctgatcaagatgcaggagtacggcttctggcccaagaacctgcctactccctacgagaggcaggaaagcgagaccgaggagcagtacaaggagagaaagtgcctgctcgagaagtacgagaaggtgatcgacgagatcagcaagctgtacgaagagaaggacaagatcaacctgaagctgagggagctccagaagaagtacgacgagacctgggactatgagcgcatccggctggatgtgagcaagaccatcatgcaggagagcatcgagaggagagctgaaagaaagcgccagcgggagctggagaaggagcagcgctccgaggagtggaagaaggagaaggagaacaagatcgtcttcatcggcaaggggtacagcagcctgctgtacgacaaggagaccgacgagaacaagctgctgctgcaggagctccctatcatcaaggatgataaggagctggccaacttcctgggcatcgagtacaagaagctgagattcctggtgtaccaccgggacgtgatctccgtggacaactaccacagatacaccatccccaagaagaagggcggcgtgagaaacatcgccgctcccaagagcatcctgaagaactcccagaggattatcctcgaggagattctgagcaagatccccacctccaactacagccacggcttcctgaaggggaagtccgtggtgagcgccgccaaggtgcacgtgaagaaacccgacctcctgatcaacatcgatctggaggacttcttccccaccatcaccttcgagagggtgagaggcatgttcaagagcttcggctacagcggatacgtggccagcatgctggccatgatctgcacctactgcgagaggatgaaggtggaggtgaggggcgaggagaagtacgtcaagatcagcgacagaattctgccccagggcagccctgccagccccatgatcaccaacatcatctgcgtgaagctggacaagagactgaacggcctgagcaccaagtatgacttcatttatactcggtacgctgacgacatgtcgttcagcttcaccggcgacatcaacgaactgagcgtcggcagcttcatgggcctggtgagcaagatcgtgaaggaagagggcttcaacatcaacaaggacaagaccaagttcctgagaaagaacaacagacagtgcatcaccggcatcgtgatcaacaacgaggagatcggcgtgcccaagaagtggatcaagatcctgagagccgccatctacaacgccaacaaggtgaagaacagcggcgagatcctgagcaacaaggtgatcaacgagatcagcggccagacctcctgggtgaagtccgtcaacgaggagagatacaaggacatcatcaacgatgccatgaacctgatcaacaacccaccaaagaagaaaagaaaggtctga

SEQ ID NO: 19236 - DNA, 1512 bp, synthetic construct
  source 1..1512: mol_type = other DNA
atgatggagaatcaggagaacaacatgaacaacagaaagaactacagagaggccgtgaacaccatgggcaagaaggaattcaccctgatcaagatgcaggagtacggcttctggcccaagaacctgcctactccctacgagaggcaggaaagcgagaccgaggagcagtacaaggagagaaagtgcctgctcgagaagtacgagaaggtgatcgacgagatcagcaagctgtacgaagagaaggacaagatcaacctgaagctgagggagctccagaagaagtacgacgagacctgggactatgagcgcatccggctggatgtgagcaagaccatcatgcaggagagcatcgagaggagagctgaaagaaagcgccagcgggagctggagaaggagcagcgctccgaggagtggaagaaggagaaggagaacaagatcgtcttcatcggcaaggggtacagcagcctgctgtacgacaaggagaccgacgagaacaagctgctgctgcaggagctccctatcatcaaggatgataaggagctggccaacttcctgggcatcgagtacaagaagctgagattcctggtgtaccaccgggacgtgatctccgtggacaactaccacagatacaccatccccaagaagaagggcggcgtgagaaacatcgccgctcccaagagcatcctgaagaactcccagaggattatcctcgaggagattctgagcaagatccccacctccaactacagccacggcttcctgaaggggaagtccgtggtgagcgccgccaaggtgcacgtgaagaaacccgacctcctgatcaacatcgatctggaggacttcttccccaccatcaccttcgagagggtgagaggcatgttcaagagcttcggctacagcggatacgtggccagcatgctggccatgatctgcacctactgcgagaggatgaaggtggaggtgaggggcgaggagaagtacgtcaagatcagcgacagaattctgccccagggcagccctgccagccccatgatcaccaacatcatctgcgtgaagctggacaagagactgaacggcctgagcaccaagtatgacttcatttatactcggtacgctgacgacatgtcgttcagcttcaccggcgacatcaacgaactgagcgtcggcagcttcatgggcctggtgagcaagatcgtgaaggaagagggcttcaacatcaacaaggacaagaccaagttcctgagaaagaacaacagacagtgcatcaccggcatcgtgatcaacaacgaggagatcggcgtgcccaagaagtggatcaagatcctgagagccgccatctacaacgccaacaaggtgaagaacagcggcgagatcctgagcaacaaggtgatcaacgagatcagcggccggacctcctgggtgaagtccgtcaacgaggagagatacaaggacatcatcaacgatgccatgaacctgatcaacaacccaccaaagaagaaaagaaaggtctga

SEQ ID NO: 19237 - DNA, 1512 bp, synthetic construct
  source 1..1512: mol_type = other DNA
atgatggagaatcaggagaacaacatgaacaacagaaagaactacagagaggccgtgaacaccatgggcaagaaggaattcaccctgatcaagatgcaggagtacggcttctggcccaagaacctgcctactccctacgagaggcaggaaagcgagaccgaggagcagtacaaggagagaaagtgcctgctcgagaagtacgagaaggtgatcgacgagatcagcaagctgtacgaagagaaggacaagatcaacctgaagctgagggagctccagaagaagtacgacgagacctgggactatgagcgcatccggctggatgtgagcaagaccatcatgcaggagagcatcgagaggagagctgaaagaaagcgccagcgggagctggagaaggagcagcgctccgaggagtggaagaaggagaaggagaacaagatcgtcttcatcggcaaggggtacagcagcctgctgtacgacaaggagaccgacgagaacaagctgctgctgcaggagctccctatcatcaaggatgataaggagctggccaacttcctgggcatcgagtacaagaagctgagattcctggtgtaccaccgggacgtgatctccgtggacaactaccacagatacaccatccccaagaagaagggcggcgtgagaaacatcgccgctcccaagagcatcctgaagaactcccagaggattatcctcgaggagattctgagcaagatccccacctccaactacagccacggcttcctgaaggggaagtccgtggtgagcgccgccaaggtgcacgtgaagaaacccgacctcctgatcaacatcgatctggaggacttcttccccaccatcaccttcgagagggtgagaggcatgttcaagagcttcggctacagcggatacgtggccagcatgctggccatgatctgcacctactgcgagaggatgaaggtggaggtgaggggcgaggagaagtacgtcaagatcagcgacagaattctgccccagggcagccctgccagccccatgatcaccaacatcatctgcgtgaagctggacaagagactgaacggcctgagcaccaagtatgacttcatttatactcggtacgctgacgacatgtcgttcagcttcaccggcgacatcaacgaactgagcgtcggcagcttcatgggcctggtgagcaagatcgtgaaggaagagggcttcaacatcaacaaggacaagaccaagttcctgagaaagaacaacagacagtgcatcaccggcatcgtgatcaacaacgaggagatcggcgtgcccaagaagtggatcaagatcctgagagccgccatctacaacgccaacaaggtgaagaacagcggcgagatcctgagcaacaaggtgatcaacgagatcagcggcatgaccggctgggtgaagtccgtcaacgaggagagatacaaggacatcatcaacgatgccatgaacctgatcaacaacccaccaaagaagaaaagaaaggtctga

SEQ ID NO: 19238 - DNA, 1512 bp, synthetic construct
  source 1..1512: mol_type = other DNA
atgatggagaatcaggagaacaacatgaacaacagaaagaactacagagaggccgtgaacaccatgggcaagaaggaattcaccctgatcaagatgcaggagtacggcttctggcccaagaacctgcctactccctacgagaggcaggaaagcgagaccgaggagcagtacaaggagagaaagtgcctgctcgagaagtacgagaaggtgatcgacgagatcagcaagctgtacgaagagaaggacaagatcaacctgaagctgagggagctccagaagaagtacgacgagacctgggactatgagcgcatccggctggatgtgagcaagaccatcatgcaggagagcatcgagaggagagctgaaagaaagcgccagcgggagctggagaaggagcagcgctccgaggagtggaagaaggagaaggagaacaagatcgtcttcatcggcaaggggtacagcagcctgctgtacgacaaggagaccgacgagaacaagctgctgctgcaggagctccctatcatcaaggatgataaggagctggccaacttcctgggcatcgagtacaagaagctgagattcctggtgtaccaccgggacgtgatctccgtggacaactaccacagatacaccatccccaagaagaagggcggcgtgagaaacatcgccgctcccaagagcatcctgaagaactcccagaggattatcctcgaggagattctgagcaagatccccacctccaactacagccacggcttcctgaaggggaagtccgtggtgagcgccgccaaggtgcacgtgaagaaacccgacctcctgatcaacatcgatctggaggacttcttccccaccatcaccttcgagagggtgagaggcatgttcaagagcttcggctacagcggatacgtggccagcatgctggccatgatctgcacctactgcgagaggatgaaggtggaggtgaggggcgaggagaagtacgtcaagatcagcgacagaattctgccccagggcagccctgccagccccatgatcaccaacatcatctgcgtgaagctggacaagagactgaacggcctgagcaccaagtatgacttcatttatactcggtacgctgacgacatgtcgttcagcttcaccggcgacatcaacgaactgagcgtcggcagcttcatgggcctggtgagcaagatcgtgaaggaagagggcttcaacatcaacaaggacaagaccaagttcctgagaaagaacaacagacagtgcatcaccggcatcgtgatcaacaacgaggagatcggcgtgcccaagaagtggatcaagatcctgagagccgccatctacaacgccaacaaggtgaagaacagcggcgagatcctgagcaacaaggtgatcaacgagatcagcggcatgaccccctgggtgaagtccgtcaacgaggagagatacaaggacatcatcaacgatgccatgaacctgatcaacaacccaccaaagaagaaaagaaaggtctga

SEQ ID NO: 19239 - DNA, 1512 bp, synthetic construct
  source 1..1512: mol_type = other DNA
atgatggagaatcaggagaacaacatgaacaacagaaagaactacagagaggccgtgaacaccatgggcaagaaggaattcaccctgatcaagatgcaggagtacggcttctggcccaagaacctgcctactccctacgagaggcaggaaagcgagaccgaggagcagtacaaggagagaaagtgcctgctcgagaagtacgagaaggtgatcgacgagatcagcaagctgtacgaagagaaggacaagatcaacctgaagctgagggagctccagaagaagtacgacgagacctgggactatgagcgcatccggctggatgtgagcaagaccatcatgcaggagagcatcgagaggagagctgaaagaaagcgccagcgggagctggagaaggagcagcgctccgaggagtggaagaaggagaaggagaacaagatcgtcttcatcggcaaggggtacagcagcctgctgtacgacaaggagaccgacgagaacaagctgctgctgcaggagctccctatcatcaaggatgataaggagctggccaacttcctgggcatcgagtacaagaagctgagattcctggtgtaccaccgggacgtgatctccgtggacaactaccacagatacaccatccccaagaagaagggcggcgtgagaaacatcgccgctcccaagagcatcctgaagaactcccagaggattatcctcgaggagattctgagcaagatccccacctccaactacagccacggcttcctgaaggggaagtccgtggtgagcgccgccaaggtgcacgtgaagaaacccgacctcctgatcaacatcgatctggaggacttcttccccaccatcaccttcgagagggtgagaggcatgttcaagagcttcggctacagcggatacgtggccagcatgctggccatgatctgcacctactgcgagaggatgaaggtggaggtgaggggcgaggagaagtacgtcaagatcagcgacagaattctgccccagggcagccctgccagccccatgatcaccaacatcatctgcgtgaagctggacaagagactgaacggcctgagcaccaagtatgacttcatttatactcggtacgctgacgacatgtcgttcagcttcaccggcgacatcaacgaactgagcgtcggcagcttcatgggcctggtgagcaagatcgtgaaggaagagggcttcaacatcaacaaggacaagaccaagttcctgagaaagaacaacagacagtgcatcaccggcatcgtgatcaacaacgaggagatcggcgtgcccaagaagtggatcaagatcctgagagccgccatctacaacgccaacaaggtgaagaacagcggcgagatcctgagcaacaaggtgatcaacgagatcagcggcatgacctccttcgtgaagtccgtcaacgaggagagatacaaggacatcatcaacgatgccatgaacctgatcaacaacccaccaaagaagaaaagaaaggtctga

SEQ ID NO: 19240 - DNA, 1512 bp, synthetic construct
  source 1..1512: mol_type = other DNA
atgatggagaatcaggagaacaacatgaacaacagaaagaactacagagaggccgtgaacaccatgggcaagaaggaattcaccctgatcaagatgcaggagtacggcttctggcccaagaacctgcctactccctacgagaggcaggaaagcgagaccgaggagcagtacaaggagagaaagtgcctgctcgagaagtacgagaaggtgatcgacgagatcagcaagctgtacgaagagaaggacaagatcaacctgaagctgagggagctccagaagaagtacgacgagacctgggactatgagcgcatccggctggatgtgagcaagaccatcatgcaggagagcatcgagaggagagctgaaagaaagcgccagcgggagctggagaaggagcagcgctccgaggagtggaagaaggagaaggagaacaagatcgtcttcatcggcaaggggtacagcagcctgctgtacgacaaggagaccgacgagaacaagctgctgctgcaggagctccctatcatcaaggatgataaggagctggccaacttcctgggcatcgagtacaagaagctgagattcctggtgtaccaccgggacgtgatctccgtggacaactaccacagatacaccatccccaagaagaagggcggcgtgagaaacatcgccgctcccaagagcatcctgaagaactcccagaggattatcctcgaggagattctgagcaagatccccacctccaactacagccacggcttcctgaaggggaagtccgtggtgagcgccgccaaggtgcacgtgaagaaacccgacctcctgatcaacatcgatctggaggacttcttccccaccatcaccttcgagagggtgagaggcatgttcaagagcttcggctacagcggatacgtggccagcatgctggccatgatctgcacctactgcgagaggatgaaggtggaggtgaggggcgaggagaagtacgtcaagatcagcgacagaattctgccccagggcagccctgccagccccatgatcaccaacatcatctgcgtgaagctggacaagagactgaacggcctgagcaccaagtatgacttcatttatactcggtacgctgacgacatgtcgttcagcttcaccggcgacatcaacgaactgagcgtcggcagcttcatgggcctggtgagcaagatcgtgaaggaagagggcttcaacatcaacaaggacaagaccaagttcctgagaaagaacaacagacagtgcatcaccggcatcgtgatcaacaacgaggagatcggcgtgcccaagaagtggatcaagatcctgagagccgccatctacaacgccaacaaggtgaagaacagcggcgagatcctgagcaacaaggtgatcaacgagatcagcggcatgacctccaaggtgaagtccgtcaacgaggagagatacaaggacatcatcaacgatgccatgaacctgatcaacaacccaccaaagaagaaaagaaaggtctga

SEQ ID NO: 19241 - DNA, 1512 bp, synthetic construct
  source 1..1512: mol_type = other DNA
atgatggagaatcaggagaacaacatgaacaacagaaagaactacagagaggccgtgaacaccatgggcaagaaggaattcaccctgatcaagatgcaggagtacggcttctggcccaagaacctgcctactccctacgagaggcaggaaagcgagaccgaggagcagtacaaggagagaaagtgcctgctcgagaagtacgagaaggtgatcgacgagatcagcaagctgtacgaagagaaggacaagatcaacctgaagctgagggagctccagaagaagtacgacgagacctgggactatgagcgcatccggctggatgtgagcaagaccatcatgcaggagagcatcgagaggagagctgaaagaaagcgccagcgggagctggagaaggagcagcgctccgaggagtggaagaaggagaaggagaacaagatcgtcttcatcggcaaggggtacagcagcctgctgtacgacaaggagaccgacgagaacaagctgctgctgcaggagctccctatcatcaaggatgataaggagctggccaacttcctgggcatcgagtacaagaagctgagattcctggtgtaccaccgggacgtgatctccgtggacaactaccacagatacaccatccccaagaagaagggcggcgtgagaaacatcgccgctcccaagagcatcctgaagaactcccagaggattatcctcgaggagattctgagcaagatccccacctccaactacagccacggcttcctgaaggggaagtccgtggtgagcgccgccaaggtgcacgtgaagaaacccgacctcctgatcaacatcgatctggaggacttcttccccaccatcaccttcgagagggtgagaggcatgttcaagagcttcggctacagcggatacgtggccagcatgctggccatgatctgcacctactgcgagaggatgaaggtggaggtgaggggcgaggagaagtacgtcaagatcagcgacagaattctgccccagggcagccctgccagccccatgatcaccaacatcatctgcgtgaagctggacaagagactgaacggcctgagcaccaagtatgacttcatttatactcggtacgctgacgacatgtcgttcagcttcaccggcgacatcaacgaactgagcgtcggcagcttcatgggcctggtgagcaagatcgtgaaggaagagggcttcaacatcaacaaggacaagaccaagttcctgagaaagaacaacagacagtgcatcaccggcatcgtgatcaacaacgaggagatcggcgtgcccaagaagtggatcaagatcctgagagccgccatctacaacgccaacaaggtgaagaacagcggcgagatcctgagcaacaaggtgatcaacgagatcagcggcatgacctcccgggtgaagtccgtcaacgaggagagatacaaggacatcatcaacgatgccatgaacctgatcaacaacccaccaaagaagaaaagaaaggtctga

SEQ ID NO: 19242 - DNA, 1512 bp, synthetic construct
  source 1..1512: mol_type = other DNA
atgatggagaatcaggagaacaacatgaacaacagaaagaactacagagaggccgtgaacaccatgggcaagaaggaattcaccctgatcaagatgcaggagtacggcttctggcccaagaacctgcctactccctacgagaggcaggaaagcgagaccgaggagcagtacaaggagagaaagtgcctgctcgagaagtacgagaaggtgatcgacgagatcagcaagctgtacgaagagaaggacaagatcaacctgaagctgagggagctccagaagaagtacgacgagacctgggactatgagcgcatccggctggatgtgagcaagaccatcatgcaggagagcatcgagaggagagctgaaagaaagcgccagcgggagctggagaaggagcagcgctccgaggagtggaagaaggagaaggagaacaagatcgtcttcatcggcaaggggtacagcagcctgctgtacgacaaggagaccgacgagaacaagctgctgctgcaggagctccctatcatcaaggatgataaggagctggccaacttcctgggcatcgagtacaagaagctgagattcctggtgtaccaccgggacgtgatctccgtggacaactaccacagatacaccatccccaagaagaagggcggcgtgagaaacatcgccgctcccaagagcatcctgaagaactcccagaggattatcctcgaggagattctgagcaagatccccacctccaactacagccacggcttcctgaaggggaagtccgtggtgagcgccgccaaggtgcacgtgaagaaacccgacctcctgatcaacatcgatctggaggacttcttccccaccatcaccttcgagagggtgagaggcatgttcaagagcttcggctacagcggatacgtggccagcatgctggccatgatctgcacctactgcgagaggatgaaggtggaggtgaggggcgaggagaagtacgtcaagatcagcgacagaattctgccccagggcagccctgccagccccatgatcaccaacatcatctgcgtgaagctggacaagagactgaacggcctgagcaccaagtatgacttcatttatactcggtacgctgacgacatgtcgttcagcttcaccggcgacatcaacgaactgagcgtcggcagcttcatgggcctggtgagcaagatcgtgaaggaagagggcttcaacatcaacaaggacaagaccaagttcctgagaaagaacaacagacagtgcatcaccggcatcgtgatcaacaacgaggagatcggcgtgcccaagaagtggatcaagatcctgagagccgccatctacaacgccaacaaggtgaagaacagcggcgagatcctgagcaacaaggtgatcaacgagatcagcggcatgacctcctacgtgaagtccgtcaacgaggagagatacaaggacatcatcaacgatgccatgaacctgatcaacaacccaccaaagaagaaaagaaaggtctga

SEQ ID NO: 19243 - DNA, 1512 bp, synthetic construct
  source 1..1512: mol_type = other DNA
atgatggagaatcaggagaacaacatgaacaacagaaagaactacagagaggccgtgaacaccatgggcaagaaggaattcaccctgatcaagatgcaggagtacggcttctggcccaagaacctgcctactccctacgagaggcaggaaagcgagaccgaggagcagtacaaggagagaaagtgcctgctcgagaagtacgagaaggtgatcgacgagatcagcaagctgtacgaagagaaggacaagatcaacctgaagctgagggagctccagaagaagtacgacgagacctgggactatgagcgcatccggctggatgtgagcaagaccatcatgcaggagagcatcgagaggagagctgaaagaaagcgccagcgggagctggagaaggagcagcgctccgaggagtggaagaaggagaaggagaacaagatcgtcttcatcggcaaggggtacagcagcctgctgtacgacaaggagaccgacgagaacaagctgctgctgcaggagctccctatcatcaaggatgataaggagctggccaacttcctgggcatcgagtacaagaagctgagattcctggtgtaccaccgggacgtgatctccgtggacaactaccacagatacaccatccccaagaagaagggcggcgtgagaaacatcgccgctcccaagagcatcctgaagaactcccagaggattatcctcgaggagattctgagcaagatccccacctccaactacagccacggcttcctgaaggggaagtccgtggtgagcgccgccaaggtgcacgtgaagaaacccgacctcctgatcaacatcgatctggaggacttcttccccaccatcaccttcgagagggtgagaggcatgttcaagagcttcggctacagcggatacgtggccagcatgctggccatgatctgcacctactgcgagaggatgaaggtggaggtgaggggcgaggagaagtacgtcaagatcagcgacagaattctgccccagggcagccctgccagccccatgatcaccaacatcatctgcgtgaagctggacaagagactgaacggcctgagcaccaagtatgacttcatttatactcggtacgctgacgacatgtcgttcagcttcaccggcgacatcaacgaactgagcgtcggcagcttcatgggcctggtgagcaagatcgtgaaggaagagggcttcaacatcaacaaggacaagaccaagttcctgagaaagaacaacagacagtgcatcaccggcatcgtgatcaacaacgaggagatcggcgtgcccaagaagtggatcaagatcctgagagccgccatctacaacgccaacaaggtgaagaacagcggcgagatcctgagcaacaaggtgatcaacgagatcagcggcatgacctcctgggtgaactccgtcaacgaggagagatacaaggacatcatcaacgatgccatgaacctgatcaacaacccaccaaagaagaaaagaaaggtctga

SEQ ID NO: 19244 - DNA, 1512 bp, synthetic construct
  source 1..1512: mol_type = other DNA
atgatggagaatcaggagaacaacatgaacaacagaaagaactacagagaggccgtgaacaccatgggcaagaaggaattcaccctgatcaagatgcaggagtacggcttctggcccaagaacctgcctactccctacgagaggcaggaaagcgagaccgaggagcagtacaaggagagaaagtgcctgctcgagaagtacgagaaggtgatcgacgagatcagcaagctgtacgaagagaaggacaagatcaacctgaagctgagggagctccagaagaagtacgacgagacctgggactatgagcgcatccggctggatgtgagcaagaccatcatgcaggagagcatcgagaggagagctgaaagaaagcgccagcgggagctggagaaggagcagcgctccgaggagtggaagaaggagaaggagaacaagatcgtcttcatcggcaaggggtacagcagcctgctgtacgacaaggagaccgacgagaacaagctgctgctgcaggagctccctatcatcaaggatgataaggagctggccaacttcctgggcatcgagtacaagaagctgagattcctggtgtaccaccgggacgtgatctccgtggacaactaccacagatacaccatccccaagaagaagggcggcgtgagaaacatcgccgctcccaagagcatcctgaagaactcccagaggattatcctcgaggagattctgagcaagatccccacctccaactacagccacggcttcctgaaggggaagtccgtggtgagcgccgccaaggtgcacgtgaagaaacccgacctcctgatcaacatcgatctggaggacttcttccccaccatcaccttcgagagggtgagaggcatgttcaagagcttcggctacagcggatacgtggccagcatgctggccatgatctgcacctactgcgagaggatgaaggtggaggtgaggggcgaggagaagtacgtcaagatcagcgacagaattctgccccagggcagccctgccagccccatgatcaccaacatcatctgcgtgaagctggacaagagactgaacggcctgagcaccaagtatgacttcatttatactcggtacgctgacgacatgtcgttcagcttcaccggcgacatcaacgaactgagcgtcggcagcttcatgggcctggtgagcaagatcgtgaaggaagagggcttcaacatcaacaaggacaagaccaagttcctgagaaagaacaacagacagtgcatcaccggcatcgtgatcaacaacgaggagatcggcgtgcccaagaagtggatcaagatcctgagagccgccatctacaacgccaacaaggtgaagaacagcggcgagatcctgagcaacaaggtgatcaacgagatcagcggcatgacctcctgggtgcagtccgtcaacgaggagagatacaaggacatcatcaacgatgccatgaacctgatcaacaacccaccaaagaagaaaagaaaggtctga

SEQ ID NO: 19245 - DNA, 1512 bp, synthetic construct
  source 1..1512: mol_type = other DNA
atgatggagaatcaggagaacaacatgaacaacagaaagaactacagagaggccgtgaacaccatgggcaagaaggaattcaccctgatcaagatgcaggagtacggcttctggcccaagaacctgcctactccctacgagaggcaggaaagcgagaccgaggagcagtacaaggagagaaagtgcctgctcgagaagtacgagaaggtgatcgacgagatcagcaagctgtacgaagagaaggacaagatcaacctgaagctgagggagctccagaagaagtacgacgagacctgggactatgagcgcatccggctggatgtgagcaagaccatcatgcaggagagcatcgagaggagagctgaaagaaagcgccagcgggagctggagaaggagcagcgctccgaggagtggaagaaggagaaggagaacaagatcgtcttcatcggcaaggggtacagcagcctgctgtacgacaaggagaccgacgagaacaagctgctgctgcaggagctccctatcatcaaggatgataaggagctggccaacttcctgggcatcgagtacaagaagctgagattcctggtgtaccaccgggacgtgatctccgtggacaactaccacagatacaccatccccaagaagaagggcggcgtgagaaacatcgccgctcccaagagcatcctgaagaactcccagaggattatcctcgaggagattctgagcaagatccccacctccaactacagccacggcttcctgaaggggaagtccgtggtgagcgccgccaaggtgcacgtgaagaaacccgacctcctgatcaacatcgatctggaggacttcttccccaccatcaccttcgagagggtgagaggcatgttcaagagcttcggctacagcggatacgtggccagcatgctggccatgatctgcacctactgcgagaggatgaaggtggaggtgaggggcgaggagaagtacgtcaagatcagcgacagaattctgccccagggcagccctgccagccccatgatcaccaacatcatctgcgtgaagctggacaagagactgaacggcctgagcaccaagtatgacttcatttatactcggtacgctgacgacatgtcgttcagcttcaccggcgacatcaacgaactgagcgtcggcagcttcatgggcctggtgagcaagatcgtgaaggaagagggcttcaacatcaacaaggacaagaccaagttcctgagaaagaacaacagacagtgcatcaccggcatcgtgatcaacaacgaggagatcggcgtgcccaagaagtggatcaagatcctgagagccgccatctacaacgccaacaaggtgaagaacagcggcgagatcctgagcaacaaggtgatcaacgagatcagcggcatgacctcctgggtgcggtccgtcaacgaggagagatacaaggacatcatcaacgatgccatgaacctgatcaacaacccaccaaagaagaaaagaaaggtctga

SEQ ID NO: 19246 - DNA, 1512 bp, synthetic construct
  source 1..1512: mol_type = other DNA
atgatggagaatcaggagaacaacatgaacaacagaaagaactacagagaggccgtgaacaccatgggcaagaaggaattcaccctgatcaagatgcaggagtacggcttctggcccaagaacctgcctactccctacgagaggcaggaaagcgagaccgaggagcagtacaaggagagaaagtgcctgctcgagaagtacgagaaggtgatcgacgagatcagcaagctgtacgaagagaaggacaagatcaacctgaagctgagggagctccagaagaagtacgacgagacctgggactatgagcgcatccggctggatgtgagcaagaccatcatgcaggagagcatcgagaggagagctgaaagaaagcgccagcgggagctggagaaggagcagcgctccgaggagtggaagaaggagaaggagaacaagatcgtcttcatcggcaaggggtacagcagcctgctgtacgacaaggagaccgacgagaacaagctgctgctgcaggagctccctatcatcaaggatgataaggagctggccaacttcctgggcatcgagtacaagaagctgagattcctggtgtaccaccgggacgtgatctccgtggacaactaccacagatacaccatccccaagaagaagggcggcgtgagaaacatcgccgctcccaagagcatcctgaagaactcccagaggattatcctcgaggagattctgagcaagatccccacctccaactacagccacggcttcctgaaggggaagtccgtggtgagcgccgccaaggtgcacgtgaagaaacccgacctcctgatcaacatcgatctggaggacttcttccccaccatcaccttcgagagggtgagaggcatgttcaagagcttcggctacagcggatacgtggccagcatgctggccatgatctgcacctactgcgagaggatgaaggtggaggtgaggggcgaggagaagtacgtcaagatcagcgacagaattctgccccagggcagccctgccagccccatgatcaccaacatcatctgcgtgaagctggacaagagactgaacggcctgagcaccaagtatgacttcatttatactcggtacgctgacgacatgtcgttcagcttcaccggcgacatcaacgaactgagcgtcggcagcttcatgggcctggtgagcaagatcgtgaaggaagagggcttcaacatcaacaaggacaagaccaagttcctgagaaagaacaacagacagtgcatcaccggcatcgtgatcaacaacgaggagatcggcgtgcccaagaagtggatcaagatcctgagagccgccatctacaacgccaacaaggtgaagaacagcggcgagatcctgagcaacaaggtgatcaacgagatcagcggcatgacctcctgggtgaagaaggtcaacgaggagagatacaaggacatcatcaacgatgccatgaacctgatcaacaacccaccaaagaagaaaagaaaggtctga

SEQ ID NO: 19247 - DNA, 1512 bp, synthetic construct
  source 1..1512: mol_type = other DNA
atgatggagaatcaggagaacaacatgaacaacagaaagaactacagagaggccgtgaacaccatgggcaagaaggaattcaccctgatcaagatgcaggagtacggcttctggcccaagaacctgcctactccctacgagaggcaggaaagcgagaccgaggagcagtacaaggagagaaagtgcctgctcgagaagtacgagaaggtgatcgacgagatcagcaagctgtacgaagagaaggacaagatcaacctgaagctgagggagctccagaagaagtacgacgagacctgggactatgagcgcatccggctggatgtgagcaagaccatcatgcaggagagcatcgagaggagagctgaaagaaagcgccagcgggagctggagaaggagcagcgctccgaggagtggaagaaggagaaggagaacaagatcgtcttcatcggcaaggggtacagcagcctgctgtacgacaaggagaccgacgagaacaagctgctgctgcaggagctccctatcatcaaggatgataaggagctggccaacttcctgggcatcgagtacaagaagctgagattcctggtgtaccaccgggacgtgatctccgtggacaactaccacagatacaccatccccaagaagaagggcggcgtgagaaacatcgccgctcccaagagcatcctgaagaactcccagaggattatcctcgaggagattctgagcaagatccccacctccaactacagccacggcttcctgaaggggaagtccgtggtgagcgccgccaaggtgcacgtgaagaaacccgacctcctgatcaacatcgatctggaggacttcttccccaccatcaccttcgagagggtgagaggcatgttcaagagcttcggctacagcggatacgtggccagcatgctggccatgatctgcacctactgcgagaggatgaaggtggaggtgaggggcgaggagaagtacgtcaagatcagcgacagaattctgccccagggcagccctgccagccccatgatcaccaacatcatctgcgtgaagctggacaagagactgaacggcctgagcaccaagtatgacttcatttatactcggtacgctgacgacatgtcgttcagcttcaccggcgacatcaacgaactgagcgtcggcagcttcatgggcctggtgagcaagatcgtgaaggaagagggcttcaacatcaacaaggacaagaccaagttcctgagaaagaacaacagacagtgcatcaccggcatcgtgatcaacaacgaggagatcggcgtgcccaagaagtggatcaagatcctgagagccgccatctacaacgccaacaaggtgaagaacagcggcgagatcctgagcaacaaggtgatcaacgagatcagcggcatgacctcctgggtgaagaacgtcaacgaggagagatacaaggacatcatcaacgatgccatgaacctgatcaacaacccaccaaagaagaaaagaaaggtctga

SEQ ID NO: 19248 - DNA, 1512 bp, synthetic construct
  source 1..1512: mol_type = other DNA
atgatggagaatcaggagaacaacatgaacaacagaaagaactacagagaggccgtgaacaccatgggcaagaaggaattcaccctgatcaagatgcaggagtacggcttctggcccaagaacctgcctactccctacgagaggcaggaaagcgagaccgaggagcagtacaaggagagaaagtgcctgctcgagaagtacgagaaggtgatcgacgagatcagcaagctgtacgaagagaaggacaagatcaacctgaagctgagggagctccagaagaagtacgacgagacctgggactatgagcgcatccggctggatgtgagcaagaccatcatgcaggagagcatcgagaggagagctgaaagaaagcgccagcgggagctggagaaggagcagcgctccgaggagtggaagaaggagaaggagaacaagatcgtcttcatcggcaaggggtacagcagcctgctgtacgacaaggagaccgacgagaacaagctgctgctgcaggagctccctatcatcaaggatgataaggagctggccaacttcctgggcatcgagtacaagaagctgagattcctggtgtaccaccgggacgtgatctccgtggacaactaccacagatacaccatccccaagaagaagggcggcgtgagaaacatcgccgctcccaagagcatcctgaagaactcccagaggattatcctcgaggagattctgagcaagatccccacctccaactacagccacggcttcctgaaggggaagtccgtggtgagcgccgccaaggtgcacgtgaagaaacccgacctcctgatcaacatcgatctggaggacttcttccccaccatcaccttcgagagggtgagaggcatgttcaagagcttcggctacagcggatacgtggccagcatgctggccatgatctgcacctactgcgagaggatgaaggtggaggtgaggggcgaggagaagtacgtcaagatcagcgacagaattctgccccagggcagccctgccagccccatgatcaccaacatcatctgcgtgaagctggacaagagactgaacggcctgagcaccaagtatgacttcatttatactcggtacgctgacgacatgtcgttcagcttcaccggcgacatcaacgaactgagcgtcggcagcttcatgggcctggtgagcaagatcgtgaaggaagagggcttcaacatcaacaaggacaagaccaagttcctgagaaagaacaacagacagtgcatcaccggcatcgtgatcaacaacgaggagatcggcgtgcccaagaagtggatcaagatcctgagagccgccatctacaacgccaacaaggtgaagaacagcggcgagatcctgagcaacaaggtgatcaacgagatcagcggcatgacctcctgggtgaagcaggtcaacgaggagagatacaaggacatcatcaacgatgccatgaacctgatcaacaacccaccaaagaagaaaagaaaggtctga

SEQ ID NO: 19249 - DNA, 1512 bp, synthetic construct
  source 1..1512: mol_type = other DNA
atgatggagaatcaggagaacaacatgaacaacagaaagaactacagagaggccgtgaacaccatgggcaagaaggaattcaccctgatcaagatgcaggagtacggcttctggcccaagaacctgcctactccctacgagaggcaggaaagcgagaccgaggagcagtacaaggagagaaagtgcctgctcgagaagtacgagaaggtgatcgacgagatcagcaagctgtacgaagagaaggacaagatcaacctgaagctgagggagctccagaagaagtacgacgagacctgggactatgagcgcatccggctggatgtgagcaagaccatcatgcaggagagcatcgagaggagagctgaaagaaagcgccagcgggagctggagaaggagcagcgctccgaggagtggaagaaggagaaggagaacaagatcgtcttcatcggcaaggggtacagcagcctgctgtacgacaaggagaccgacgagaacaagctgctgctgcaggagctccctatcatcaaggatgataaggagctggccaacttcctgggcatcgagtacaagaagctgagattcctggtgtaccaccgggacgtgatctccgtggacaactaccacagatacaccatccccaagaagaagggcggcgtgagaaacatcgccgctcccaagagcatcctgaagaactcccagaggattatcctcgaggagattctgagcaagatccccacctccaactacagccacggcttcctgaaggggaagtccgtggtgagcgccgccaaggtgcacgtgaagaaacccgacctcctgatcaacatcgatctggaggacttcttccccaccatcaccttcgagagggtgagaggcatgttcaagagcttcggctacagcggatacgtggccagcatgctggccatgatctgcacctactgcgagaggatgaaggtggaggtgaggggcgaggagaagtacgtcaagatcagcgacagaattctgccccagggcagccctgccagccccatgatcaccaacatcatctgcgtgaagctggacaagagactgaacggcctgagcaccaagtatgacttcatttatactcggtacgctgacgacatgtcgttcagcttcaccggcgacatcaacgaactgagcgtcggcagcttcatgggcctggtgagcaagatcgtgaaggaagagggcttcaacatcaacaaggacaagaccaagttcctgagaaagaacaacagacagtgcatcaccggcatcgtgatcaacaacgaggagatcggcgtgcccaagaagtggatcaagatcctgagagccgccatctacaacgccaacaaggtgaagaacagcggcgagatcctgagcaacaaggtgatcaacgagatcagcggcatgacctcctgggtgaagcgggtcaacgaggagagatacaaggacatcatcaacgatgccatgaacctgatcaacaacccaccaaagaagaaaagaaaggtctga

SEQ ID NO: 19250 - DNA, 1512 bp, synthetic construct
  source 1..1512: mol_type = other DNA
atgatggagaatcaggagaacaacatgaacaacagaaagaactacagagaggccgtgaacaccatgggcaagaaggaattcaccctgatcaagatgcaggagtacggcttctggcccaagaacctgcctactccctacgagaggcaggaaagcgagaccgaggagcagtacaaggagagaaagtgcctgctcgagaagtacgagaaggtgatcgacgagatcagcaagctgtacgaagagaaggacaagatcaacctgaagctgagggagctccagaagaagtacgacgagacctgggactatgagcgcatccggctggatgtgagcaagaccatcatgcaggagagcatcgagaggagagctgaaagaaagcgccagcgggagctggagaaggagcagcgctccgaggagtggaagaaggagaaggagaacaagatcgtcttcatcggcaaggggtacagcagcctgctgtacgacaaggagaccgacgagaacaagctgctgctgcaggagctccctatcatcaaggatgataaggagctggccaacttcctgggcatcgagtacaagaagctgagattcctggtgtaccaccgggacgtgatctccgtggacaactaccacagatacaccatccccaagaagaagggcggcgtgagaaacatcgccgctcccaagagcatcctgaagaactcccagaggattatcctcgaggagattctgagcaagatccccacctccaactacagccacggcttcctgaaggggaagtccgtggtgagcgccgccaaggtgcacgtgaagaaacccgacctcctgatcaacatcgatctggaggacttcttccccaccatcaccttcgagagggtgagaggcatgttcaagagcttcggctacagcggatacgtggccagcatgctggccatgatctgcacctactgcgagaggatgaaggtggaggtgaggggcgaggagaagtacgtcaagatcagcgacagaattctgccccagggcagccctgccagccccatgatcaccaacatcatctgcgtgaagctggacaagagactgaacggcctgagcaccaagtatgacttcatttatactcggtacgctgacgacatgtcgttcagcttcaccggcgacatcaacgaactgagcgtcggcagcttcatgggcctggtgagcaagatcgtgaaggaagagggcttcaacatcaacaaggacaagaccaagttcctgagaaagaacaacagacagtgcatcaccggcatcgtgatcaacaacgaggagatcggcgtgcccaagaagtggatcaagatcctgagagccgccatctacaacgccaacaaggtgaagaacagcggcgagatcctgagcaacaaggtgatcaacgagatcagcggcatgacctcctgggtgaagtccttcaacgaggagagatacaaggacatcatcaacgatgccatgaacctgatcaacaacccaccaaagaagaaaagaaaggtctga

SEQ ID NO: 19251 - DNA, 1512 bp, synthetic construct
  source 1..1512: mol_type = other DNA
atgatggagaatcaggagaacaacatgaacaacagaaagaactacagagaggccgtgaacaccatgggcaagaaggaattcaccctgatcaagatgcaggagtacggcttctggcccaagaacctgcctactccctacgagaggcaggaaagcgagaccgaggagcagtacaaggagagaaagtgcctgctcgagaagtacgagaaggtgatcgacgagatcagcaagctgtacgaagagaaggacaagatcaacctgaagctgagggagctccagaagaagtacgacgagacctgggactatgagcgcatccggctggatgtgagcaagaccatcatgcaggagagcatcgagaggagagctgaaagaaagcgccagcgggagctggagaaggagcagcgctccgaggagtggaagaaggagaaggagaacaagatcgtcttcatcggcaaggggtacagcagcctgctgtacgacaaggagaccgacgagaacaagctgctgctgcaggagctccctatcatcaaggatgataaggagctggccaacttcctgggcatcgagtacaagaagctgagattcctggtgtaccaccgggacgtgatctccgtggacaactaccacagatacaccatccccaagaagaagggcggcgtgagaaacatcgccgctcccaagagcatcctgaagaactcccagaggattatcctcgaggagattctgagcaagatccccacctccaactacagccacggcttcctgaaggggaagtccgtggtgagcgccgccaaggtgcacgtgaagaaacccgacctcctgatcaacatcgatctggaggacttcttccccaccatcaccttcgagagggtgagaggcatgttcaagagcttcggctacagcggatacgtggccagcatgctggccatgatctgcacctactgcgagaggatgaaggtggaggtgaggggcgaggagaagtacgtcaagatcagcgacagaattctgccccagggcagccctgccagccccatgatcaccaacatcatctgcgtgaagctggacaagagactgaacggcctgagcaccaagtatgacttcatttatactcggtacgctgacgacatgtcgttcagcttcaccggcgacatcaacgaactgagcgtcggcagcttcatgggcctggtgagcaagatcgtgaaggaagagggcttcaacatcaacaaggacaagaccaagttcctgagaaagaacaacagacagtgcatcaccggcatcgtgatcaacaacgaggagatcggcgtgcccaagaagtggatcaagatcctgagagccgccatctacaacgccaacaaggtgaagaacagcggcgagatcctgagcaacaaggtgatcaacgagatcagcggcatgacctcctgggtgaagtccatcaacgaggagagatacaaggacatcatcaacgatgccatgaacctgatcaacaacccaccaaagaagaaaagaaaggtctga

SEQ ID NO: 19252 - DNA, 1512 bp, synthetic construct
  source 1..1512: mol_type = other DNA
atgatggagaatcaggagaacaacatgaacaacagaaagaactacagagaggccgtgaacaccatgggcaagaaggaattcaccctgatcaagatgcaggagtacggcttctggcccaagaacctgcctactccctacgagaggcaggaaagcgagaccgaggagcagtacaaggagagaaagtgcctgctcgagaagtacgagaaggtgatcgacgagatcagcaagctgtacgaagagaaggacaagatcaacctgaagctgagggagctccagaagaagtacgacgagacctgggactatgagcgcatccggctggatgtgagcaagaccatcatgcaggagagcatcgagaggagagctgaaagaaagcgccagcgggagctggagaaggagcagcgctccgaggagtggaagaaggagaaggagaacaagatcgtcttcatcggcaaggggtacagcagcctgctgtacgacaaggagaccgacgagaacaagctgctgctgcaggagctccctatcatcaaggatgataaggagctggccaacttcctgggcatcgagtacaagaagctgagattcctggtgtaccaccgggacgtgatctccgtggacaactaccacagatacaccatccccaagaagaagggcggcgtgagaaacatcgccgctcccaagagcatcctgaagaactcccagaggattatcctcgaggagattctgagcaagatccccacctccaactacagccacggcttcctgaaggggaagtccgtggtgagcgccgccaaggtgcacgtgaagaaacccgacctcctgatcaacatcgatctggaggacttcttccccaccatcaccttcgagagggtgagaggcatgttcaagagcttcggctacagcggatacgtggccagcatgctggccatgatctgcacctactgcgagaggatgaaggtggaggtgaggggcgaggagaagtacgtcaagatcagcgacagaattctgccccagggcagccctgccagccccatgatcaccaacatcatctgcgtgaagctggacaagagactgaacggcctgagcaccaagtatgacttcatttatactcggtacgctgacgacatgtcgttcagcttcaccggcgacatcaacgaactgagcgtcggcagcttcatgggcctggtgagcaagatcgtgaaggaagagggcttcaacatcaacaaggacaagaccaagttcctgagaaagaacaacagacagtgcatcaccggcatcgtgatcaacaacgaggagatcggcgtgcccaagaagtggatcaagatcctgagagccgccatctacaacgccaacaaggtgaagaacagcggcgagatcctgagcaacaaggtgatcaacgagatcagcggcatgacctcctgggtgaagtccctgaacgaggagagatacaaggacatcatcaacgatgccatgaacctgatcaacaacccaccaaagaagaaaagaaaggtctga

SEQ ID NO: 19253 - DNA, 1512 bp, synthetic construct
  source 1..1512: mol_type = other DNA
atgatggagaatcaggagaacaacatgaacaacagaaagaactacagagaggccgtgaacaccatgggcaagaaggaattcaccctgatcaagatgcaggagtacggcttctggcccaagaacctgcctactccctacgagaggcaggaaagcgagaccgaggagcagtacaaggagagaaagtgcctgctcgagaagtacgagaaggtgatcgacgagatcagcaagctgtacgaagagaaggacaagatcaacctgaagctgagggagctccagaagaagtacgacgagacctgggactatgagcgcatccggctggatgtgagcaagaccatcatgcaggagagcatcgagaggagagctgaaagaaagcgccagcgggagctggagaaggagcagcgctccgaggagtggaagaaggagaaggagaacaagatcgtcttcatcggcaaggggtacagcagcctgctgtacgacaaggagaccgacgagaacaagctgctgctgcaggagctccctatcatcaaggatgataaggagctggccaacttcctgggcatcgagtacaagaagctgagattcctggtgtaccaccgggacgtgatctccgtggacaactaccacagatacaccatccccaagaagaagggcggcgtgagaaacatcgccgctcccaagagcatcctgaagaactcccagaggattatcctcgaggagattctgagcaagatccccacctccaactacagccacggcttcctgaaggggaagtccgtggtgagcgccgccaaggtgcacgtgaagaaacccgacctcctgatcaacatcgatctggaggacttcttccccaccatcaccttcgagagggtgagaggcatgttcaagagcttcggctacagcggatacgtggccagcatgctggccatgatctgcacctactgcgagaggatgaaggtggaggtgaggggcgaggagaagtacgtcaagatcagcgacagaattctgccccagggcagccctgccagccccatgatcaccaacatcatctgcgtgaagctggacaagagactgaacggcctgagcaccaagtatgacttcatttatactcggtacgctgacgacatgtcgttcagcttcaccggcgacatcaacgaactgagcgtcggcagcttcatgggcctggtgagcaagatcgtgaaggaagagggcttcaacatcaacaaggacaagaccaagttcctgagaaagaacaacagacagtgcatcaccggcatcgtgatcaacaacgaggagatcggcgtgcccaagaagtggatcaagatcctgagagccgccatctacaacgccaacaaggtgaagaacagcggcgagatcctgagcaacaaggtgatcaacgagatcagcggcatgacctcctgggtgaagtcctggaacgaggagagatacaaggacatcatcaacgatgccatgaacctgatcaacaacccaccaaagaagaaaagaaaggtctga

SEQ ID NO: 19254 - DNA, 1512 bp, synthetic construct
  source 1..1512: mol_type = other DNA
atgatggagaatcaggagaacaacatgaacaacagaaagaactacagagaggccgtgaacaccatgggcaagaaggaattcaccctgatcaagatgcaggagtacggcttctggcccaagaacctgcctactccctacgagaggcaggaaagcgagaccgaggagcagtacaaggagagaaagtgcctgctcgagaagtacgagaaggtgatcgacgagatcagcaagctgtacgaagagaaggacaagatcaacctgaagctgagggagctccagaagaagtacgacgagacctgggactatgagcgcatccggctggatgtgagcaagaccatcatgcaggagagcatcgagaggagagctgaaagaaagcgccagcgggagctggagaaggagcagcgctccgaggagtggaagaaggagaaggagaacaagatcgtcttcatcggcaaggggtacagcagcctgctgtacgacaaggagaccgacgagaacaagctgctgctgcaggagctccctatcatcaaggatgataaggagctggccaacttcctgggcatcgagtacaagaagctgagattcctggtgtaccaccgggacgtgatctccgtggacaactaccacagatacaccatccccaagaagaagggcggcgtgagaaacatcgccgctcccaagagcatcctgaagaactcccagaggattatcctcgaggagattctgagcaagatccccacctccaactacagccacggcttcctgaaggggaagtccgtggtgagcgccgccaagcctcacgtgaagaaacccgacctcctgatcaacatcgatctggaggacttcttccccaccatcaccttcgagagggtgagaggcatgttcaagagcttcggctacagcggatacgtggccagcatgctggccatgatctgcacctactgcgagaggatgaaggtggaggtgaggggcgaggagaagtacgtcaagatcagcgacagaattctgccccagggcagccctgccagccccatgatcaccaacatcatctgcgtgaagctggacaagagactgaacggcctgagcaccaagtatgacttcatttatactcggtacgctgacgacatgtcgttcagcttcaccggcgacatcaacgaactgagcgtcggcagcttcatgggcctggtgagcaagatcgtgaaggaagagggcttcaacatcaacaaggacaagaccaagttcctgagaaagaacaacagacagtgcatcaccggcatcgtgatcaacaacgaggagatcggcgtgcccaagaagtggatcaagatcctgagagccgccatctacaacgccaacaaggtgaagaacagcggcgagatcctgagcaacaaggtgatcaacgagatcagcggcatgacctcctgggtgaagtccgtcaacgaggagagatacaaggacatcatcaacgatgccatgaacctgatcaacaacccaccaaagaagaaaagaaaggtctga

SEQ ID NO: 19255 - DNA, 1512 bp, synthetic construct
  source 1..1512: mol_type = other DNA
atgatggagaatcaggagaacaacatgaacaacagaaagaactacagagaggccgtgaacaccatgggcaagaaggaattcaccctgatcaagatgcaggagtacggcttctggcccaagaacctgcctactccctacgagaggcaggaaagcgagaccgaggagcagtacaaggagagaaagtgcctgctcgagaagtacgagaaggtgatcgacgagatcagcaagctgtacgaagagaaggacaagatcaacctgaagctgagggagctccagaagaagtacgacgagacctgggactatgagcgcatccggctggatgtgagcaagaccatcatgcaggagagcatcgagaggagagctgaaagaaagcgccagcgggagctggagaaggagcagcgctccgaggagtggaagaaggagaaggagaacaagatcgtcttcatcggcaaggggtacagcagcctgctgtacgacaaggagaccgacgagaacaagctgctgctgcaggagctccctatcatcaaggatgataaggagctggccaacttcctgggcatcgagtacaagaagctgagattcctggtgtaccaccgggacgtgatctccgtggacaactaccacagatacaccatccccaagaagaagggcggcgtgagaaacatcgccgctcccaagagcatcctgaagaactcccagaggattatcctcgaggagattctgagcaagatccccacctccaactacagccacggcttcctgaaggggaagtccgtggtgagcgccgccaaggtgcacgtgaagaaacccgacctcctgatcaacatcgatctggaggacttcttccccaccatcaccttcgagagggtgagaggcatgttcaagagcttcggctacagcggatacgtggccagcatgctggccatgatctgcacctactgcgagaggatgaaggtggaggtgaggggcgaggagaagtacgtcaagatcagcgacagaattctgccccagggcagccctgccagccccatgatcaccaacatcatctgcgtgaagctggacaagagactgaacggcctgagcaccaagtatgacttcatttatactcggtacgctgacgacatgtcgttcagcttcaccggcgacatcaacgaactgagcgtcggcagcttcatgggcctggtgagcaagatcgtgaaggaagagggcttcaacatcaacaaggacaagaccaagttcctgagaaagaacaacagacagtgcatcaccggcatcgtgatcaacaacgaggagatcggcgtgcccaagaagtggatcaagatcctgagagccgccatctacaacgccaataaggttaagaatagtggagaaattctaagtaataaagtcataaacgagatcagcggcaagacctcctgggtgaagtccttcaacgaggagagatacaaggacatcatcaacgatgccatgaacctgatcaacaacccaccaaagaagaaaagaaaggtctga

SEQ ID NO: 19256 - DNA, 1512 bp, synthetic construct
  source 1..1512: mol_type = other DNA
atgatggagaatcaggagaacaacatgaacaacagaaagaactacagagaggccgtgaacaccatgggcaagaaggaattcaccctgatcaagatgcaggagtacggcttctggcccaagaacctgcctactccctacgagaggcaggaaagcgagaccgaggagcagtacaaggagagaaagtgcctgctcgagaagtacgagaaggtgatcgacgagatcagcaagctgtacgaagagaaggacaagatcaacctgaagctgagggagctccagaagaagtacgacgagacctgggactatgagcgcatccggctggatgtgagcaagaccatcatgcaggagagcatcgagaggagagctgaaagaaagcgccagcgggagctggagaaggagcagcgctccgaggagtggaagaaggagaaggagaacaagatcgtcttcatcggcaaggggtacagcagcctgctgtacgacaaggagaccgacgagaacaagctgctgctgcaggagctccctatcatcaaggatgataaggagctggccaacttcctgggcatcgagtacaagaagctgagattcctggtgtaccaccgggacgtgatctccgtggacaactaccacagatacaccatccccaagaagaagggcggcgtgagaaacatcgccgctcccaagagcatcctgaagaactcccagaggattatcctcgaggagattctgagcaagatccccacctccaactacagccacggcttcctgaaggggaagtccgtggtgagcgccgccaagccccacgtgaagaaacccgacctcctgatcaacatcgatctggaggacttcttccccaccatcaccttcgagagggtgagaggcatgttcaagagcttcggctacagcggatacgtggccagcatgctggccatgatctgcacctactgcgagaggatgaaggtggaggtgaggggcgaggagaagtacgtcaagatcagcgacagaattctgccccagggcagccctgccagccccatgatcaccaacatcatctgcgtgaagctggacaagagactgaacggcctgagcaccaagtatgacttcatttatactcggtacgctgacgacatgtcgttcagcttcaccggcgacatcaacgaactgagcgtcggcagcttcatgggcctggtgagcaagatcgtgaaggaagagggcttcaacatcaacaaggacaagaccaagttcctgagaaagaacaacagacagtgcatcaccggcatcgtgatcaacaacgaggagatcggcgtgcccaagaagtggatcaagatcctgagagccgccatctacaacgccaataaggttaagaatagtggagaaattctaagtaataaagtcataaacgagatcagcggcaagacctcctgggtgaagtccttcaacgaggagagatacaaggacatcatcaacgatgccatgaacctgatcaacaacccaccaaagaagaaaagaaaggtctga

SEQ ID NO: 19257 - DNA, 1164 bp, synthetic construct
  source 1..1164: mol_type = other DNA
atggagaggagagctgaaagaaagcgccagcgggagctggagaaggagcagcgctccgaggagtggaagaaggagaaggagaacaagatcgtcttcatcggcaaggggtacagcagcctgctgtacgacaaggagaccgacgagaacaagctgctgctgcaggagctccctatcatcaaggatgataaggagctggccaacttcctgggcatcgagtacaagaaactgagattcctggtgtaccaccgggacgtgatctccgtggacaactaccacagatacaccatccccaagaagaagggcggcgtgagaaacatcgccgctcccaagagcatcctgaagaactcccagaggattatcctcgaggagattctgagcaagatccccacctccaactacagccacggcttcctgaaggggaagtccgtggtgagcgccgccaaggtgcacgtgaagaaacccgacctcctgatcaacatcgatctggaggacttcttccccaccatcaccttcgagagggtgagaggcatgttcaagagcttcggctacagcggatacgtggccagcatgctggccatgatctgcacctactgcgagaggatgaaggtggaggtgaggggcgaggagaagtacgtcaagatcagcgacagaattctgccccagggcagccctgccagccccatgatcaccaacatcatctgcgtgaagctggacaagagactgaacggcctgagcaccaagtatgacttcatttatactcggtacgctgacgacatgtcgttcagcttcaccggcgacatcaacgaactgagcgtcggcagcttcatgggcctggtgagcaagatcgtgaaggaagagggcttcaacatcaacaaggacaagaccaagttcctgagaaagaacaacagacagtgcatcaccggcatcgtgatcaacaacgaggagatcggcgtgcccaagaagtggatcaagatcctgagagccgccatctacaacgccaacaaggtgaagaacagcggcgagatcctgagcaataaggtgatcaacgagatcagcggcatgacctcctgggtgaagtccgtcaacgaagagagatacaaggacattatcaacgatgccatgaacctgatcaacaacccaccaaagaagaaacggaaggtctga

SEQ ID NO: 19258 - DNA, 1752 bp, synthetic construct
  source 1..1752: mol_type = other DNA
atgaccgtcaagttcaagtacaagggtgaggaacttgaagttgatattagcaaaatcaagaaggtttggcgcgttggtaaaatgatatcttttacttatgacgacaacggcaagacaggtagaggggcagtgtctgagaaagacgcccccaaggagctgttgcaaatgttggaaaagtctgggaaaaagtctggcggctcaaaaagaaccgccgacggcagcgaattcgagcccaagaagaagaggaaagtcgggacaggtggcggtggtgtcgagaatcaggagaacaacatgaacaacagaaagaactacagagaggccgtgaacaccatgggcaagaaggaattcaccctgatcaagatgcaggagtacggcttctggcccaagaacctgcctactccctacgagaggcaggaaagcgagaccgaggagcagtacaaggagagaaagtgcctgctcgagaagtacgagaaggtgatcgacgagatcagcaagctgtacgaagagaaggacaagatcaacctgaagctgagggagctccagaagaagtacgacgagacctgggactatgagcgcatccggctggatgtgagcaagaccatcatgcaggagagcatcgagaggagagctgaaagaaagcgccagcgggagctggagaaggagcagcgctccgaggagtggaagaaggagaaggagaacaagatcgtcttcatcggcaaggggtacagcagcctgctgtacgacaaggagaccgacgagaacaagctgctgctgcaggagctccctatcatcaaggatgataaggagctggccaacttcctgggcatcgagtacaagaagctgagattcctggtgtaccaccgggacgtgatctccgtggacaactaccacagatacaccatccccaagaagaagggcggcgtgagaaacatcgccgctcccaagagcatcctgaagaactcccagaggattatcctcgaggagattctgagcaagatccccacctccaactacagccacggcttcctgaaggggaagtccgtggtgagcgccgccaaggtgcacgtgaagaaacccgacctcctgatcaacatcgatctggaggacttcttccccaccatcaccttcgagagggtgagaggcatgttcaagagcttcggctacagcggatacgtggccagcatgctggccatgatctgcacctactgcgagaggatgaaggtggaggtgaggggcgaggagaagtacgtcaagatcagcgacagaattctgccccagggcagccctgccagccccatgatcaccaacatcatctgcgtgaagctggacaagagactgaacggcctgagcaccaagtatgacttcatttatactcggtacgctgacgacatgtcgttcagcttcaccggcgacatcaacgaactgagcgtcggcagcttcatgggcctggtgagcaagatcgtgaaggaagagggcttcaacatcaacaaggacaagaccaagttcctgagaaagaacaacagacagtgcatcaccggcatcgtgatcaacaacgaggagatcggcgtgcccaagaagtggatcaagatcctgagagccgccatctacaacgccaacaaggtgaagaacagcggcgagatcctgagcaacaaggtgatcaacgagatcagcggcatgacctcctgggtgaagtccgtcaacgaggagagatacaaggacatcatcaacgatgccatgaacctgatcaacaac

SEQ ID NO: 19259 - DNA, 1710 bp, synthetic construct
  source 1..1710: mol_type = other DNA
atgacagtgaagttcaagtacaagggcgaggaaaaggaagtcgacatcagcaagatcaagaaagtgtggcgggtgggcaagatgatcagcttcacctacgacgagggcggaggaaagaccggcagaggcgccgtgtctgagaaagatgcccctaaggagctgctgcagatgctggaaaaacagaagaagcccaagaagaagaggaaagtcgggacaggtggcggtggtgtcgagaatcaggagaacaacatgaacaacagaaagaactacagagaggccgtgaacaccatgggcaagaaggaattcaccctgatcaagatgcaggagtacggcttctggcccaagaacctgcctactccctacgagaggcaggaaagcgagaccgaggagcagtacaaggagagaaagtgcctgctcgagaagtacgagaaggtgatcgacgagatcagcaagctgtacgaagagaaggacaagatcaacctgaagctgagggagctccagaagaagtacgacgagacctgggactatgagcgcatccggctggatgtgagcaagaccatcatgcaggagagcatcgagaggagagctgaaagaaagcgccagcgggagctggagaaggagcagcgctccgaggagtggaagaaggagaaggagaacaagatcgtcttcatcggcaaggggtacagcagcctgctgtacgacaaggagaccgacgagaacaagctgctgctgcaggagctccctatcatcaaggatgataaggagctggccaacttcctgggcatcgagtacaagaagctgagattcctggtgtaccaccgggacgtgatctccgtggacaactaccacagatacaccatccccaagaagaagggcggcgtgagaaacatcgccgctcccaagagcatcctgaagaactcccagaggattatcctcgaggagattctgagcaagatccccacctccaactacagccacggcttcctgaaggggaagtccgtggtgagcgccgccaaggtgcacgtgaagaaacccgacctcctgatcaacatcgatctggaggacttcttccccaccatcaccttcgagagggtgagaggcatgttcaagagcttcggctacagcggatacgtggccagcatgctggccatgatctgcacctactgcgagaggatgaaggtggaggtgaggggcgaggagaagtacgtcaagatcagcgacagaattctgccccagggcagccctgccagccccatgatcaccaacatcatctgcgtgaagctggacaagagactgaacggcctgagcaccaagtatgacttcatttatactcggtacgctgacgacatgtcgttcagcttcaccggcgacatcaacgaactgagcgtcggcagcttcatgggcctggtgagcaagatcgtgaaggaagagggcttcaacatcaacaaggacaagaccaagttcctgagaaagaacaacagacagtgcatcaccggcatcgtgatcaacaacgaggagatcggcgtgcccaagaagtggatcaagatcctgagagccgccatctacaacgccaacaaggtgaagaacagcggcgagatcctgagcaacaaggtgatcaacgagatcagcggcatgacctcctgggtgaagtccgtcaacgaggagagatacaaggacatcatcaacgatgccatgaacctgatcaacaac

SEQ ID NO: 19260 - DNA, 1719 bp, synthetic construct
  source 1..1719: mol_type = other DNA
atggtgaaggtgaaattcaagtacaagggcgaggaaaaagaggtggatacaagcaagatcaagaaagtgtggagagtgggaaagatggtcagcttcacctacgacgacaacggcaagaccggcagaggcgccgtgtctgagaaggacgcccctaaggaactgctggatatgctggctagagccgagcgggaaaagaagcccaagaagaagaggaaagtcgggacaggtggcggtggtgtcgagaatcaggagaacaacatgaacaacagaaagaactacagagaggccgtgaacaccatgggcaagaaggaattcaccctgatcaagatgcaggagtacggcttctggcccaagaacctgcctactccctacgagaggcaggaaagcgagaccgaggagcagtacaaggagagaaagtgcctgctcgagaagtacgagaaggtgatcgacgagatcagcaagctgtacgaagagaaggacaagatcaacctgaagctgagggagctccagaagaagtacgacgagacctgggactatgagcgcatccggctggatgtgagcaagaccatcatgcaggagagcatcgagaggagagctgaaagaaagcgccagcgggagctggagaaggagcagcgctccgaggagtggaagaaggagaaggagaacaagatcgtcttcatcggcaaggggtacagcagcctgctgtacgacaaggagaccgacgagaacaagctgctgctgcaggagctccctatcatcaaggatgataaggagctggccaacttcctgggcatcgagtacaagaagctgagattcctggtgtaccaccgggacgtgatctccgtggacaactaccacagatacaccatccccaagaagaagggcggcgtgagaaacatcgccgctcccaagagcatcctgaagaactcccagaggattatcctcgaggagattctgagcaagatccccacctccaactacagccacggcttcctgaaggggaagtccgtggtgagcgccgccaaggtgcacgtgaagaaacccgacctcctgatcaacatcgatctggaggacttcttccccaccatcaccttcgagagggtgagaggcatgttcaagagcttcggctacagcggatacgtggccagcatgctggccatgatctgcacctactgcgagaggatgaaggtggaggtgaggggcgaggagaagtacgtcaagatcagcgacagaattctgccccagggcagccctgccagccccatgatcaccaacatcatctgcgtgaagctggacaagagactgaacggcctgagcaccaagtatgacttcatttatactcggtacgctgacgacatgtcgttcagcttcaccggcgacatcaacgaactgagcgtcggcagcttcatgggcctggtgagcaagatcgtgaaggaagagggcttcaacatcaacaaggacaagaccaagttcctgagaaagaacaacagacagtgcatcaccggcatcgtgatcaacaacgaggagatcggcgtgcccaagaagtggatcaagatcctgagagccgccatctacaacgccaacaaggtgaagaacagcggcgagatcctgagcaacaaggtgatcaacgagatcagcggcatgacctcctgggtgaagtccgtcaacgaggagagatacaaggacatcatcaacgatgccatgaacctgatcaacaac

SEQ ID NO: 19261 - DNA, 1719 bp, synthetic construct
  source 1..1719: mol_type = other DNA
atggtcaaggtgaagttcaagtacaagggcgaggaaaaagaggtggatacaagcaagatcaagaaagtgtggagagtgggaaaaatggtgagcttcacctacgacgacaacggcaagaccggcagaggcgccgtgtctgagaaggacgcccctaaggaactgctggatatgctggctagagccgagcgggaaaagaagcccaagaagaagaggaaagtcgggacaggtggcggtggtgtcgagaatcaggagaacaacatgaacaacagaaagaactacagagaggccgtgaacaccatgggcaagaaggaattcaccctgatcaagatgcaggagtacggcttctggcccaagaacctgcctactccctacgagaggcaggaaagcgagaccgaggagcagtacaaggagagaaagtgcctgctcgagaagtacgagaaggtgatcgacgagatcagcaagctgtacgaagagaaggacaagatcaacctgaagctgagggagctccagaagaagtacgacgagacctgggactatgagcgcatccggctggatgtgagcaagaccatcatgcaggagagcatcgagaggagagctgaaagaaagcgccagcgggagctggagaaggagcagcgctccgaggagtggaagaaggagaaggagaacaagatcgtcttcatcggcaaggggtacagcagcctgctgtacgacaaggagaccgacgagaacaagctgctgctgcaggagctccctatcatcaaggatgataaggagctggccaacttcctgggcatcgagtacaagaagctgagattcctggtgtaccaccgggacgtgatctccgtggacaactaccacagatacaccatccccaagaagaagggcggcgtgagaaacatcgccgctcccaagagcatcctgaagaactcccagaggattatcctcgaggagattctgagcaagatccccacctccaactacagccacggcttcctgaaggggaagtccgtggtgagcgccgccaaggtgcacgtgaagaaacccgacctcctgatcaacatcgatctggaggacttcttccccaccatcaccttcgagagggtgagaggcatgttcaagagcttcggctacagcggatacgtggccagcatgctggccatgatctgcacctactgcgagaggatgaaggtggaggtgaggggcgaggagaagtacgtcaagatcagcgacagaattctgccccagggcagccctgccagccccatgatcaccaacatcatctgcgtgaagctggacaagagactgaacggcctgagcaccaagtatgacttcatttatactcggtacgctgacgacatgtcgttcagcttcaccggcgacatcaacgaactgagcgtcggcagcttcatgggcctggtgagcaagatcgtgaaggaagagggcttcaacatcaacaaggacaagaccaagttcctgagaaagaacaacagacagtgcatcaccggcatcgtgatcaacaacgaggagatcggcgtgcccaagaagtggatcaagatcctgagagccgccatctacaacgccaacaaggtgaagaacagcggcgagatcctgagcaacaaggtgatcaacgagatcagcggcatgacctcctgggtgaagtccgtcaacgaggagagatacaaggacatcatcaacgatgccatgaacctgatcaacaac

SEQ ID NO: 19262 - RNA, 987 nt, synthetic construct; identical to SEQ ID NO: 19118
  source 1..987: mol_type = other RNA

SEQ ID NO: 19263 - RNA, 399 nt, synthetic construct; identical to SEQ ID NO: 19119
  source 1..399: mol_type = other RNA

SEQ ID NO: 19264 - RNA, 975 nt, synthetic construct; identical to SEQ ID NO: 19120
  source 1..975: mol_type = other RNA

SEQ ID NO: 19265 - RNA, 418 nt, synthetic construct; identical to SEQ ID NO: 19121
  source 1..418: mol_type = other RNA

SEQ ID NO: 19266 - RNA, 984 nt, synthetic construct; identical to SEQ ID NO: 19122
  source 1..984: mol_type = other RNA

SEQ ID NO: 19267 - RNA, 437 nt, synthetic construct; identical to SEQ ID NO: 19123
  source 1..437: mol_type = other RNA

SEQ ID NO: 19268 - RNA, 4506 nt, synthetic construct; identical to SEQ ID NO: 19132
  source 1..4506: mol_type = other RNA

SEQ ID NO: 19269 - RNA, 111 nt, synthetic construct; identical to SEQ ID NO: 19124
  source 1..111: mol_type = other RNA

SEQ ID NO: 19270 - RNA, 111 nt, synthetic construct; identical to SEQ ID NO: 19124
  source 1..111: mol_type = other RNA

SEQ ID NO: 19271 - RNA, 307 nt, synthetic construct; identical to SEQ ID NO: 19135
  source 1..307: mol_type = other RNA

SEQ ID NO: 19272 - RNA, 326 nt, synthetic construct; identical to SEQ ID NO: 19136
  source 1..326: mol_type = other RNA

SEQ ID NO: 19273 - RNA, 377 nt, synthetic construct
  source 1..377: mol_type = other RNA
taccggcgaaacaaaagaaaaaaccaaaaaaacaaaacacatgataagattccgtaagagccaaacctagcattttatgggttaatagcccatcgggccatgagtcatggtttcgcctagtattttagctatgcccgtcgttcagttcgctgaacaaacggcagaagctggaggaggaagggcctgagtccgagcagaagaattacgtctgcaaagttctcccatcacatcaaccggtggcgcattgccacgaagcaggccaatggggaggacatcgatgtcatcagcgaactgatcgacgtgctcaagtaggtttggctcttacggaatcttatcaaaaaaacaaaaaacaaaacggctattatgcgttaccggcg

SEQ ID NO: 19274 - RNA, 1201 nt, synthetic construct; identical to SEQ ID NO: 19137
  source 1..1201: mol_type = other RNA

SEQ ID NO: 19275 - RNA, 417 nt, synthetic construct
  source 1..417: mol_type = other RNA
gtataaaaccgggaacgatcagaccggggtgaattcgcccccttgatcaaacggcactaaccactgtttgccgtgcgtgcgtcagaagaagaagggctcccatcacatcaaccggtggcgcattgccacgaagcaggccaatggggaggacatcgatgtcacctccaatgttcgaacgatcgggtgggcaaccacaaacccacgagggcagagtgctgcttgctgctacgcacgcacggcaaacagacagatccattattattacaatttatttagtgatcgttcccggttttatacaataacaacgtcacctccaatgactaggggtttcagagctatgctggaaacagcatagcaagttgaaataaggctagtccgttatcaacttgaaaaagtggcaccgagtcggtgcttttt

SEQ ID NO: 19276 - RNA, 442 nt, synthetic construct; identical to SEQ ID NO: 19138
  source 1..442: mol_type = other RNA

SEQ ID NO: 19277 - RNA, 442 nt, synthetic construct; identical to SEQ ID NO: 19139
  source 1..442: mol_type = other RNA

SEQ ID NO: 19278 - RNA, 435 nt, synthetic construct; identical to SEQ ID NO: 19140
  source 1..435: mol_type = other RNA

SEQ ID NO: 19279 - RNA, 300 nt, synthetic construct; identical to SEQ ID NO: 19141
  source 1..300: mol_type = other RNA

SEQ ID NO: 19280 - RNA, 424 nt, synthetic construct; identical to SEQ ID NO: 19142
  source 1..424: mol_type = other RNA

SEQ ID NO: 19281 - RNA, 435 nt, synthetic construct; identical to SEQ ID NO: 19143
  source 1..435: mol_type = other RNA

SEQ ID NO: 19282 - RNA, 460 nt, synthetic construct; identical to SEQ ID NO: 19144
  source 1..460: mol_type = other RNA

SEQ ID NO: 19283 - RNA, 485 nt, synthetic construct; identical to SEQ ID NO: 19145
  source 1..485: mol_type = other RNA

SEQ ID NO: 19284 - RNA, 510 nt, synthetic construct; identical to SEQ ID NO: 19146
  source 1..510: mol_type = other RNA

SEQ ID NO: 19285 - RNA, 1674 nt, synthetic construct; identical to SEQ ID NO: 19147
  source 1..1674: mol_type = other RNA

SEQ ID NO: 19286 - RNA, 435 nt, synthetic construct; identical to SEQ ID NO: 19148
  source 1..435: mol_type = other RNA

SEQ ID NO: 19287 - RNA, 417 nt, synthetic construct; identical to SEQ ID NO: 19149
  source 1..417: mol_type = other RNA

SEQ ID NO: 19288 - RNA, 297 nt, synthetic construct; identical to SEQ ID NO: 19150
  source 1..297: mol_type = other RNA

SEQ ID NO: 19289 - RNA, 407 nt, synthetic construct; identical to SEQ ID NO: 19151
  source 1..407: mol_type = other RNA

SEQ ID NO: 19290 - RNA, 417 nt, synthetic construct; identical to SEQ ID NO: 19152
  source 1..417: mol_type = other RNA

SEQ ID NO: 19291 - RNA, 417 nt, synthetic construct; identical to SEQ ID NO: 19152
  source 1..417: mol_type = other RNA

SEQ ID NO: 19292 - RNA, 467 nt, synthetic construct; identical to SEQ ID NO: 19154
  source 1..467: mol_type = other RNA

SEQ ID NO: 19293 - RNA, 492 nt, synthetic construct; identical to SEQ ID NO: 19155
  source 1..492: mol_type = other RNA

SEQ ID NO: 19294 - RNA, 1656 nt, synthetic construct; identical to SEQ ID NO: 19156
  source 1..1656: mol_type = other RNA

SEQ ID NO: 19295 - RNA, 417 nt, synthetic construct; identical to SEQ ID NO: 19157
  source 1..417: mol_type = other RNA

SEQ ID NO: 19296 - RNA, 482 nt, synthetic construct; identical to SEQ ID NO: 19158
  source 1..482: mol_type = other RNA

SEQ ID NO: 19297 - RNA, 362 nt, synthetic construct; identical to SEQ ID NO: 19159
  source 1..362: mol_type = other RNA

SEQ ID NO: 19298 - RNA, 472 nt, synthetic construct; identical to SEQ ID NO: 19160
  source 1..472: mol_type = other RNA

SEQ ID NO: 19299 - RNA, 482 nt, synthetic construct; identical to SEQ ID NO: 19161
  source 1..482: mol_type = other RNA

SEQ ID NO: 19300 - RNA, 507 nt, synthetic construct; identical to SEQ ID NO: 19162
  source 1..507: mol_type = other RNA

SEQ ID NO: 19301 - RNA, 532 nt, synthetic construct; identical to SEQ ID NO: 19163
  source 1..532: mol_type = other RNA

SEQ ID NO: 19302 - RNA, 557 nt, synthetic construct; identical to SEQ ID NO: 19164
  source 1..557: mol_type = other RNA

SEQ ID NO: 19303 - RNA, 482 nt, synthetic construct; identical to SEQ ID NO: 19165
  source 1..482: mol_type = other RNA

SEQ ID NO: 19304 - RNA, 1047 nt, synthetic construct; identical to SEQ ID NO: 19166
  source 1..1047: mol_type = other RNA

SEQ ID NO: 19305 - RNA, 1524 nt, synthetic construct; identical to SEQ ID NO: 19167
  source 1..1524: mol_type = other RNA

SEQ ID NO: 19306 - RNA, 1693 nt, synthetic construct; identical to SEQ ID NO: 19168
  source 1..1693: mol_type = other RNA

SEQ ID NO: 19307 - RNA, 529 nt, synthetic construct; identical to SEQ ID NO: 19169
  source 1..529: mol_type = other RNA

SEQ ID NO: 19308 - RNA, 504 nt, synthetic construct; identical to SEQ ID NO: 19170
  source 1..504: mol_type = other RNA

SEQ ID NO: 19309 - RNA, 479 nt, synthetic construct; identical to SEQ ID NO: 19171
  source 1..479: mol_type = other RNA

SEQ ID NO: 19310 - RNA, 454 nt, synthetic construct; identical to SEQ ID NO: 19172
  source 1..454: mol_type = other RNA

SEQ ID NO: 19311 - RNA, 444 nt, synthetic construct; identical to SEQ ID NO: 19173
  source 1..444: mol_type = other RNA

SEQ ID NO: 19312 - RNA, 334 nt, synthetic construct; identical to SEQ ID NO: 19174
  source 1..334: mol_type = other RNA

SEQ ID NO: 19313 - RNA, 111 nt, synthetic construct; identical to SEQ ID NO: 19175
  source 1..111: mol_type = other RNA

SEQ ID NO: 19314 - RNA, 1893 nt, synthetic construct; identical to SEQ ID NO: 19176
  source 1..1893: mol_type = other RNA

SEQ ID NO: 19315 - RNA, 754 nt, synthetic construct; identical to SEQ ID NO: 19177
  source 1..754: mol_type = other RNA

SEQ ID NO: 19316 - RNA, 554 nt, synthetic construct; identical to SEQ ID NO: 19178
  source 1..554: mol_type = other RNA

SEQ ID NO: 19317 - RNA, 274 nt, synthetic construct; identical to SEQ ID NO: 19179
  source 1..274: mol_type = other RNA

SEQ ID NO: 19318 - RNA, 654 nt, synthetic construct; identical to SEQ ID NO: 19180
  source 1..654: mol_type = other RNA

SEQ ID NO: 19319 - RNA, 454 nt, synthetic construct; identical to SEQ ID NO: 19181
  source 1..454: mol_type = other RNA

SEQ ID NO: 19320 - RNA, 574 nt, synthetic construct; identical to SEQ ID NO: 19182
  source 1..574: mol_type = other RNA

SEQ ID NO: 19321 - RNA, 574 nt, synthetic construct; identical to SEQ ID NO: 19183
  source 1..574: mol_type = other RNA

SEQ ID NO: 19322 - RNA, 444 nt, synthetic construct; identical to SEQ ID NO: 19184
  source 1..444: mol_type = other RNA

SEQ ID NO: 19323 - RNA, 444 nt, synthetic construct; identical to SEQ ID NO: 19184
  source 1..444: mol_type = other RNA

SEQ ID NO: 19324 - RNA, 744 nt, synthetic construct; identical to SEQ ID NO: 19186
  source 1..744: mol_type = other RNA

SEQ ID NO: 19325 - RNA, 763 nt, synthetic construct; identical to SEQ ID NO: 19187
  source 1..763: mol_type = other RNA

SEQ ID NO: 19326 - RNA, 463 nt, synthetic construct; identical to SEQ ID NO: 19188
  source 1..463: mol_type = other RNA

SEQ ID NO: 19327 - RNA, 283 nt, synthetic construct; identical to SEQ ID NO: 19189
  source 1..283: mol_type = other RNA

SEQ ID NO: 19328 - RNA, 573 nt, synthetic construct; identical to SEQ ID NO: 19190
  source 1..573: mol_type = other RNA

SEQ ID NO: 19329 - RNA, 293 nt, synthetic construct; identical to SEQ ID NO: 19191
  source 1..293: mol_type = other RNA

SEQ ID NO: 19330 - RNA, 1032 nt, synthetic construct; identical to SEQ ID NO: 19192
  source 1..1032: mol_type = other RNA

SEQ ID NO: 19331 - RNA, 564 nt, synthetic construct; identical to SEQ ID NO: 19193
  source 1..564: mol_type = other RNA

SEQ ID NO: 19332 - RNA, 473 nt, synthetic construct; identical to SEQ ID NO: 19194
  source 1..473: mol_type = other RNA

SEQ ID NO: 19333 - RNA, 564 nt, synthetic construct; identical to SEQ ID NO: 19195
  source 1..564: mol_type = other RNA

SEQ ID NO: 19334 - RNA, 673 nt, synthetic construct; identical to SEQ ID NO: 19196
  source 1..673: mol_type = other RNA

SEQ ID NO: 19335 - RNA, 773 nt, synthetic construct; identical to SEQ ID NO: 19197
  source 1..773: mol_type = other RNA

SEQ ID NO: 19336 - RNA, 1051 nt, synthetic construct; identical to SEQ ID NO: 19198
  source 1..1051: mol_type = other RNA

SEQ ID NO: 19337 - RNA, 1218 nt, synthetic construct; identical to SEQ ID NO: 19199
  source 1..1218: mol_type = other RNA

SEQ ID NO: 19338 - RNA, 1237 nt, synthetic construct; identical to SEQ ID NO: 19200
  source 1..1237: mol_type = other RNA

SEQ ID NO: 19339 - RNA, 2040 nt, synthetic construct; identical to SEQ ID NO: 19201
  source 1..2040: mol_type = other RNA

SEQ ID NO: 19340 - RNA, 463 nt, synthetic construct; identical to SEQ ID NO: 19202
  source 1..463: mol_type = other RNA

SEQ ID NO: 19341 - RNA, 353 nt, synthetic construct; identical to SEQ ID NO: 19203
  source 1..353: mol_type = other RNA

SEQ ID NO: 19342 - RNA, 473 nt, synthetic construct; identical to SEQ ID NO: 19204
  source 1..473: mol_type = other RNA

SEQ ID NO: 19343 - RNA, 1712 nt, synthetic construct; identical to SEQ ID NO: 19205
  source 1..1712: mol_type = other RNA

SEQ ID NO: 19344 - RNA, 498 nt, synthetic construct; identical to SEQ ID NO: 19206
  source 1..498: mol_type = other RNA

SEQ ID NO: 19345 - RNA, 548 nt, synthetic construct; identical to SEQ ID NO: 19207
  source 1..548: mol_type = other RNA

SEQ ID NO: 19346 - RNA, 523 nt, synthetic construct; identical to SEQ ID NO: 19208
  source 1..523: mol_type = other RNA

SEQ ID NO: 19347 - RNA, 383 nt, synthetic construct; identical to SEQ ID NO: 19209
  source 1..383: mol_type = other RNA

SEQ ID NO: 19348 - RNA, 488 nt, synthetic construct; identical to SEQ ID NO: 19210
  source 1..488: mol_type = other RNA

SEQ ID NO: 19349 - RNA, 502 nt, synthetic construct; identical to SEQ ID NO: 19211
  source 1..502: mol_type = other RNA

SEQ ID NO: 19350 - RNA, 1200 nt, synthetic construct
  source 1..1200: mol_type = other RNA
aggataatgggaaataagagagaaaagaagagtaagaagaaatataagaggatccgccaccatgggttacaactacgagtacaccatcaggctgtgtgagacgctcaagtccttgagcgctgacgacgtgtacatcagcaagtgctgcaactacgccgagggactcctggataaggagctccctgtgatcttcgaccccacccacctgaagcagatcctgaggctggacgacatcagcctcgacgagtaccacatcttctatatcgacaagaagaacgggggcagcagagagatcaatgcccccagcgaggagctgaagaagcgccaacgctggattctcaagaacatccttgagaagatcagcatcagccacaacgtgcacggcttcatcaagggcaagagcattgtcagcaatgctcgcaagcacctgaacaaggagtatgtgctgaacatcgacatcaaggacttcttccccagcgtcaccaaatactccgtggagaagatcttccggagaatgggctactgcaacagcgtggcccagctgcttgcccgcgtctgttgttacagaggcgggctgcctcagggagctcctacaagcccctacctggccaacctcgcttttgacgaggttgaccaggagatcatcaacgtggtgagaaaccgggacatcacctacaccagatacgccgacgacatgaccttcagcgccaactacgacctgagcaccttcaagaaggaggtgtacaagagcctgggcaaatacagattcagccccaacatcatgaagactcaccagatgtctggcgagaagagaaagctggtgaccggcctgatcgtggacgacaaggtgaaggtgtgcaagaagtacaagagaaagctgcggcaggagatctactactgcaagaagttcggcgtgaccaaccacctgagaaactgccacagcgagaagtccatcaactacaaggagtacctgtacggcaaggcctacttcatcaagatggtcgaggagatcgtcggcgagaagttcctggccgacctggacagcattgactggtacccaccaaagaagaaaagaaaggtctgactcgaggctggagcctcggtggccatgcttcttgccccttgggcctccccccagcccctcctccccttcctgcacccgtacccccgtggtctttgaataaagtctgagtgggcggc

SEQ ID NO: 19351 - RNA, 241 nt, synthetic construct
  source 1..241: mol_type = other RNA
gggataataagagcaactagattgaggcgattcgcctccttggaaaagggtactaagtttctgtcacaaacggcagaagctggaggaggaagggcctgagtccgagcagaagaaaactcgagctctgaatgactcctataaagttctcccatcacatcaaccggtggcgcattgccacgaagcaggccaatggggaggacatcgatgtcagacagaaatgaaataaatagtagttgctctt

SEQ ID NO: 19352 - RNA, 421 nt, synthetic construct
  source 1..421: mol_type = other RNA
gggataataagagcaactagattgaggcgattcgcctccttggaaaagggtactaagtttctgtcacaaacggcagaagctggaggaggaagggcctgagtccgagcagaagaaaaagcggtcttacggtcagtcgtattccttctcgagttccgtccagttgagcgtgtcactcccagtgtacctgcaagccgagatggctgtgcttggagtcaatcgcatgtaggatggtctccagacaccggggcaccagttttcacgcctaaagcataaacgacgagcagtcatgaaagtcttagtactggacgtgccgtttcacaaagttctcccatcacatcaaccggtggcgcattgccacgaagcaggccaatggggaggacatcgatgtcagacagaaatgaaataaatagtagttgctctt

SEQ ID NO: 19353 - RNA, 621 nt, synthetic construct
  source 1..621: mol_type = other RNA
gggataataagagcaactagattgaggcgattcgcctccttggaaaagggtactaagtttctgtcacaaacggcagaagctggaggaggaagggcctgagtccgagcagaagaactgctaaatccgcgtgataggggatttgaagtttaatcttctatcgcaaggaactgccgatcttaatggatggccggaggtggtatggaagctataagcgcgggtgagagggtaattaggcgtgttcacctacgctacgctaacgggcgattctataagattgcacattgcgtcaactcataagatgtctcaacggcatgcgcaacttgtgaagtgtctactatccttaaacgcatatctcgcacagtaactcccgaatatgtcggcatctgatgttgcccgggccgagttagtgttgagctcacggaacttattgtatgagtagtgatttgtaagagttgtcagttagctcgttcaggtaatagttgcccacacaacgtcaaaataagagaacggtcgtaacataaagttctcccatcacatcaaccggtggcgcattgccacgaagcaggccaatggggaggacatcgatgtcagacagaaatgaaataaatagtagttgctctt

SEQ ID NO: 19354 - RNA, 187 nt, synthetic construct
  source 1..187: mol_type = other RNA
gggataataagagcaactagattgaggcgattcgcctccttggaaaagggtactaagtttctgtcggaggaagggcctgagtccgagcagaagaaaactcgagctctgaatgactcctataaagttctcccatcacatcaaccggtggcgcattgcgacagaaatgaaataaatagtagttgctctt

SEQ ID NO: 19355 - RNA, 367 nt, synthetic construct
  source 1..367: mol_type = other RNA
gggataataagagcaactagattgaggcgattcgcctccttggaaaagggtactaagtttctgtcggaggaagggcctgagtccgagcagaagaaaaagcggtcttacggtcagtcgtattccttctcgagttccgtccagttgagcgtgtcactcccagtgtacctgcaagccgagatggctgtgcttggagtcaatcgcatgtaggatggtctccagacaccggggcaccagttttcacgcctaaagcataaacgacgagcagtcatgaaagtcttagtactggacgtgccgtttcacaaagttctcccatcacatcaaccggtggcgcattgcgacagaaatgaaataaatagtagttgctctt

SEQ ID NO: 19356 - RNA, 567 nt, synthetic construct
  source 1..567: mol_type = other RNA
gggataataagagcaactagattgaggcgattcgcctccttggaaaagggtactaagtttctgtcggaggaagggcctgagtccgagcagaagaactgctaaatccgcgtgataggggatttgaagtttaatcttctatcgcaaggaactgccgatcttaatggatggccggaggtggtatggaagctataagcgcgggtgagagggtaattaggcgtgttcacctacgctacgctaacgggcgattctataagattgcacattgcgtcaactcataagatgtctcaacggcatgcgcaacttgtgaagtgtctactatccttaaacgcatatctcgcacagtaactcccgaatatgtcggcatctgatgttgcccgggccgagttagtgttgagctcacggaacttattgtatgagtagtgatttgtaagagttgtcagttagctcgttcaggtaatagttgcccacacaacgtcaaaataagagaacggtcgtaacataaagttctcccatcacatcaaccggtggcgcattgcgacagaaatgaaataaatagtagttgctctt

SEQ ID NO: 19357 - RNA, 244 nt, synthetic construct
  source 1..244: mol_type = other RNA
gataatgagcgtgtgacaagattttgggcttgtgtttcgcaagctttgattaaaatggtagatggatttgctatctatcgtcatttccagtactgttatgttaaccctatgtagcctcagtcttcccatcaggctctcagctcagcctgagtgttgaggccccagtggctgctctgggtgggcaaccacaaacccacgagggcagagtgctgcttgctgctgcataatgagttgtcacacgctc

SEQ ID NO: 19358 - RNA, 261 nt, synthetic construct
  source 1..261: mol_type = other RNA
gagcgtgtgacaagattttgggcttgtgtttcgcaagctttgattaaaatggtagatggatttgctatctatcgtcatttccagtactgttatgtcagaagaagaagggctcccatcacatcaaccggtggcgcattgccacgaagcaggccaatggggaggacatcgatgtcacctccaatgaccgcagcctcccagctgctctccgtgtctccaatctcccttttgttttgatgcagcataatgagttgtcacacgctc

SEQ ID NO: 19359 - RNA, 272 nt, synthetic construct
  source 1..272: mol_type = other RNA
gggataatgagcgtgtgacaagattttgggcttgtgtttcgcaagctttgattaaaatggtagatggatttgctatctatcgtcatttccagtactgttatgtgagtccgagcagaagaagaagggataggagtcattcaaccatgggccccatgatactgaaagtgctggcaagctgcgggagcgagatacatacttctcgacagtggggctcagagctcgagttgagtccgagcagaagaagaaggggcataatgagttgtcacacgctc

SEQ ID NO: 19360 - RNA, 271 nt, synthetic construct
  source 1..271: mol_type = other RNA
ggataatgagcgtgtgacaagattttgggcttgtgtttcgcaagctttgattaaaatggtagatggatttgctatctatcgtcatttccagtactgttatgtgagtccgagcagaagaagaagggataggagtcattcaaccatgggccccatgatactgaaagtgctggcaagctgcgggagcgagatacatacttctcgacagtggggctcagagctcgagttgagtccgagcagaagaagaaggggcataatgagttgtcacacgctc

SEQ ID NO: 19361 - RNA, 226 nt, synthetic construct
  source 1..226: mol_type = other RNA
gggataatgagcgtgtgacaagattttgggcttgtgtttcgcaagctttgattaaaatggtagatggatttgctatctatcgtcatttccagtactgttatgtataggagtcattcaaccatgggccccatgatactgaaagtgctggcaagctgcgggagcgagatacatacttctcgacagtggggctcagagctcgagttgcataatgagttgtcacacgctc

SEQ ID NO: 19362 - RNA, 226 nt, synthetic construct
  source 1..226: mol_type = other RNA
gggataatgagcgtgtgacaagattttgggcttgtgtttcgcaagctttgattaaaatggtagatggatttgctatctatcgtcatttccagtactgttatgtaactcgagctctgagccccactgtcgagaagtatgtatctcgctcccgcagcttgccagcactttcagtatcatggggcccatggttgaatgactcctatgcataatgagttgtcacacgctc

SEQ ID NO: 19363 - RNA, 240 nt, synthetic construct
  source 1..240: mol_type = other RNA
gggataatcatagatttcttggcctttatgctgtggtgttgcgccacggtggagatttgtcaaatacacatcattaggttgcgaactcgagctctgagccccactgtcgagaagtatgtatctcgctcccgcagcttgccagcactttcagtatcatggggcccatggttgaatgactcctatcacaaccaaatataagaattgttagcaagaaatctatgacatgaggatcacccatgt

SEQ ID NO: 19364 - RNA, 240 nt, synthetic construct
  source 1..240: mol_type = other RNA
gggataatcatagatttcttggcctttatgctgtggtgttgcgccacggtggagatttgtcaaatacacatcattaggttgcgataggagtcattcaaccatgggccccatgatactgaaagtgctggcaagctgcgggagcgagatacatacttctcgacagtggggctcagagctcgagttcacaaccaaatataagaattgttagcaagaaatctatgacatgaggatcacccatgt

SEQ ID NO: 19365 - protein, 238 aa, synthetic construct
  VARIANT 5: note = X can be any amino acid
  VARIANT 10: note = X can be any amino acid
  VARIANT 11: note = X can be any amino acid
  VARIANT 13: note = X can be any amino acid
  VARIANT 15: note = X can be any amino acid
  VARIANT 18: note = X can be any amino acid
  VARIANT 20: note = X can be any amino acid
  VARIANT 21: note = X can be any amino acid
  VARIANT 22: note = X can be any amino acid
  VARIANT 25: note = X can be any amino acid
  VARIANT 26: note = X can be any amino acid
  VARIANT 28: note = X can be any amino acid
  VARIANT 29: note = X can be any amino acid
  VARIANT 30: note = X can be any amino acid
  VARIANT 31: note = X can be any amino acid
  VARIANT 32: note = X can be any amino acid
  VARIANT 33: note = X can be any amino acid
  VARIANT 34: note = X can be any amino acid
  VARIANT 35: note = X can be any amino acid
  VARIANT 36: note = X can be any amino acid
  VARIANT 37: note = X can be any amino acid
  VARIANT 38: note = X can be any amino acid
  VARIANT 39: note = X can be any amino acid
  VARIANT 40: note = X can be any amino acid
  VARIANT 42: note = X can be any amino acid
  VARIANT 43: note = X can be any amino acid
  VARIANT 44: note = X can be any amino acid
  VARIANT 45: note = X can be any amino acid
  VARIANT 48: note = X can be any amino acid
  VARIANT 49: note = X can be any amino acid
  VARIANT 50: note = X can be any amino acid
  VARIANT 51: note = X can be any amino acid
  VARIANT 52: note = X can be any amino acid
  VARIANT 55: note = X can be any amino acid
  VARIANT 58: note = X can be any amino acid
  VARIANT 59: note = X can be any amino acid
  VARIANT 61: note = X can be any amino acid
  VARIANT 62: note = X can be any amino acid
  VARIANT 63: note = X can be any amino acid
  VARIANT 64: note = X can be any amino acid
  VARIANT 66: note = X can be any amino acid
  VARIANT 69: note = X can be any amino acid
  VARIANT 71: note = X can be any amino acid
  VARIANT 72: note = X can be any amino acid
  VARIANT 73: note = X can be any amino acid
  VARIANT 79: note = X can be any amino acid
  VARIANT 80: note = X can be any amino acid
  VARIANT 81: note = X can be any amino acid
  VARIANT 82: note = X can be any amino acid
  VARIANT 83: note = X can be any amino acid
  VARIANT 84: note = X can be any amino acid
  VARIANT 85: note = X can be any amino acid
  VARIANT 86: note = X can be any amino acid
  VARIANT 87: note = X can be any amino acid
  VARIANT 88: note = X can be any amino acid
  VARIANT 89: note = X can be any amino acid
  VARIANT 90: note = X can be any amino acid
  VARIANT 91: note = X can be any amino acid
  VARIANT 92: note = X can be any amino acid
  VARIANT 93: note = X can be any amino acid
  VARIANT 94: note = X can be any amino acid
  VARIANT 95: note = X can be any amino acid
  VARIANT 96: note = X can be any amino acid
  VARIANT 97: note = X can be any amino acid
  VARIANT 98: note = X can be any amino acid
  VARIANT 99: note = X can be any amino acid
  VARIANT 100: note = X can be any amino acid
  VARIANT 101: note = X can be any amino acid
  VARIANT 102: note = X can be any amino acid
  VARIANT 103: note = X can be any amino acid
  VARIANT 104: note = X can be any amino acid
  VARIANT 105: note = X can be any amino acid
  VARIANT 106: note = X can be any amino acid
  VARIANT 109: note = X can be any amino acid
  VARIANT 110: note = X can be any amino acid
  VARIANT 111: note = X can be any amino acid
  VARIANT 112: note = X can be any amino acid
  VARIANT 113: note = X can be any amino acid
  VARIANT 114: note = X can be any amino acid
  VARIANT 115: note = X can be any amino acid
  VARIANT 116: note = X can be any amino acid
  VARIANT 117: note = X can be any amino acid
  VARIANT 119: note = X can be any amino acid
  VARIANT 122: note = X can be any amino acid
  VARIANT 129: note = X can be any amino acid
  VARIANT 130: note = X can be any amino acid
  VARIANT 133: note = X can be any amino acid
  VARIANT 134: note = X can be any amino acid
  VARIANT 136: note = X can be any amino acid
  VARIANT 137: note = X can be any amino acid
  VARIANT 140: note = X can be any amino acid
  VARIANT 141: note = X can be any amino acid
  VARIANT 142: note = X can be any amino acid
  VARIANT 143: note = X can be any amino acid
  VARIANT 144: note = X can be any amino acid
  VARIANT 145: note = X can be any amino acid
  VARIANT 147: note = X can be any amino acid
  VARIANT 148: note = X can be any amino acid
  VARIANT 149: note = X can be any amino acid
  VARIANT 150: note = X can be any amino acid
  VARIANT 151: note = X can be any amino acid
  VARIANT 152: note = X can be any amino acid
  VARIANT 154: note = X can be any amino acid
  VARIANT 160: note = X can be any amino acid
  VARIANT 165: note = X can be any amino acid
  VARIANT 166: note = X can be any amino acid
  VARIANT 167: note = X can be any amino acid
  VARIANT 168: note = X can be any amino acid
  VARIANT 169: note = X can be any amino acid
  VARIANT 171: note = X can be any amino acid
  VARIANT 172: note = X can be any amino acid
  VARIANT 173: note = X can be any amino acid
  VARIANT 175: note = X can be any amino acid
  VARIANT 176: note = X can be any amino acid
  VARIANT 177: note = X can be any amino acid
  VARIANT 178: note = X can be any amino acid
  VARIANT 179: note = X can be any amino acid
  VARIANT 180: note = X can be any amino acid
  VARIANT 182: note = X can be any amino acid
  VARIANT 183: note = X can be any amino acid
  VARIANT 184: note = X can be any amino acid
  VARIANT 185: note = X can be any amino acid
  VARIANT 186: note = X can be any amino acid
  VARIANT 187: note = X can be any amino acid
  VARIANT 188: note = X can be any amino acid
  VARIANT 189: note = X can be any amino acid
  VARIANT 190: note = X can be any amino acid
  VARIANT 191: note = X can be any amino acid
  VARIANT 193: note = X can be any amino acid
  VARIANT 194: note = X can be any amino acid
  VARIANT 197: note = X can be any amino acid
  VARIANT 207: note = X can be any amino acid
  VARIANT 210: note = X can be any amino acid
  VARIANT 212: note = X can be any amino acid
  VARIANT 213: note = X can be any amino acid
  VARIANT 215: note = X can be any amino acid
  VARIANT 216: note = X can be any amino acid
  VARIANT 217: note = X can be any amino acid
  VARIANT 218: note = X can be any amino acid
  VARIANT 220: note = X can be any amino acid
  VARIANT 223: note = X can be any amino acid
  VARIANT 224: note = X can be any amino acid
  VARIANT 227: note = X can be any amino acid
  VARIANT 229: note = X can be any amino acid
  VARIANT 230: note = X can be any amino acid
  VARIANT 232: note = X can be any amino acid
  VARIANT 233: note = X can be any amino acid
  VARIANT 234: note = X can be any amino acid
  VARIANT 235: note = X can be any amino acid
  VARIANT 236: note = X can be any amino acid
  VARIANT 237: note = X can be any amino acid
  VARIANT 238: note = X can be any amino acid
YKVYXIPKRXXGXRXIAXPXXXLKXXQXXXXXXXXXXXXXHXXXXAYXXXXXIKXNAXXHXXXXYXLKXDXXXFFNSIXXXXXXXXXXXXXXXXXXXXXXXXXXXXFWXXXXXXXXXLXLSXGAPSSPXXSNXXMXXFDXXXXXXCXXXXXXYXRYADDXTFSTXXXXXLXXXPXXXXXXLXXXXXXXXXXNXXKTXFSSKAHNRHXTGXTXXNXXXXSXGRXXKRXIXXLXXXXXXX

SEQ ID NO: 19366 - protein, 230 aa, synthetic construct
  VARIANT 1: note = X can be any amino acid
  VARIANT 2: note = X can be any amino acid
  VARIANT 3: note = X can be any amino acid
  VARIANT 4: note = X can be any amino acid
  VARIANT 5: note = X can be any amino acid
  VARIANT 6: note = X can be any amino acid
  VARIANT 7: note = X can be any amino acid
  VARIANT 8: note = X can be any amino acid
  VARIANT 9: note = X can be any amino acid
  VARIANT 10: note = X can be any amino acid
  VARIANT 11: note = X can be any amino acid
  VARIANT 12: note = X can be any amino acid
  VARIANT 13: note = X can be any amino acid
  VARIANT 14: note = X can be any amino acid
  VARIANT 15: note = X can be any amino acid
  VARIANT 16: note = X can be any amino acid
  VARIANT 17: note = X can be any amino acid
  VARIANT 20: note = X can be any amino acid
  VARIANT 21: note = X can be any amino acid
  VARIANT 22: note = X can be any amino acid
  VARIANT 23: note = X can be any amino acid
  VARIANT 25: note = X can be any amino acid
  VARIANT 26: note = X can be any amino acid
  VARIANT 27: note = X can be any amino acid
  VARIANT 28: note = X can be any amino acid
  VARIANT 29: note = X can be any amino acid
  VARIANT 30: note = X can be any amino acid
  VARIANT 31: note = X can be any amino acid
  VARIANT 32: note = X can be any amino acid
  VARIANT 33: note = X can be any amino acid
  VARIANT 34: note = X can be any amino acid
  VARIANT 35: note = X can be any amino acid
  VARIANT 36: note = X can be any amino acid
  VARIANT 37: note = X can be any amino acid
  VARIANT 38: note = X can be any amino acid
  VARIANT 39: note = X can be any amino acid
  VARIANT 41: note = X can be any amino acid
  VARIANT 47: note = X can be any amino acid
  VARIANT 48: note = X can be any amino acid
  VARIANT 49: note = X can be any amino acid
  VARIANT 50: note = X can be any amino acid
  VARIANT 51: note = X can be any amino acid
  VARIANT 54: note = X can be any amino acid
  VARIANT 55: note = X can be any amino acid
  VARIANT 57: note = X can be any amino acid
  VARIANT 58: note = X can be any amino acid
  VARIANT 59: note = X can be any amino acid
  VARIANT 60: note = X can be any amino acid
  VARIANT 61: note = X can be any amino acid
  VARIANT 63: note = X can be any amino acid
  VARIANT 64: note = X can be any amino acid
  VARIANT 65: note = X can be any amino acid
  VARIANT 67: note = X can be any amino acid
  VARIANT 68: note = X can be any amino acid
  VARIANT 69: note = X can be any amino acid
  VARIANT 72: note = X can be any amino acid
  VARIANT 75: note = X can be any amino acid
  VARIANT 76: note = X can be any amino acid
  VARIANT 77: note = X can be any amino acid
  VARIANT 78: note = X can be any amino acid
  VARIANT 79: note = X can be any amino acid
  VARIANT 80: note = X can be any amino acid
  VARIANT 81: note = X can be any amino acid
  VARIANT 82: note = X can be any amino acid
  VARIANT 83: note = X can be any amino acid
  VARIANT 84: note = X can be any amino acid
  VARIANT 85: note = X can be any amino acid
  VARIANT 86: note = X can be any amino acid
  VARIANT 87: note = X can be any amino acid
  VARIANT 88: note = X can be any amino acid
  VARIANT 89: note = X can be any amino acid
  VARIANT 90: note = X can be any amino acid
  VARIANT 92: note = X can be any amino acid
  VARIANT 93: note = X can be any amino acid
  VARIANT 95: note = X can be any amino acid
  VARIANT 96: note = X can be any amino acid
  VARIANT 97: note = X can be any amino acid
  VARIANT 98: note = X can be any amino acid
  VARIANT 99: note = X can be any amino acid
  VARIANT 100: note = X can be any amino acid
  VARIANT 101: note = X can be any amino acid
  VARIANT 102: note = X can be any amino acid
  VARIANT 103: note = X can be any amino acid
  VARIANT 104: note = X can be any amino acid
  VARIANT 105: note = X can be any amino acid
  VARIANT 106: note = X can be any amino acid
  VARIANT 107: note = X can be any amino acid
  VARIANT 108: note = X can be any amino acid
  VARIANT 109: note = X can be any amino acid
  VARIANT 110: note = X can be any amino acid
  VARIANT 111: note = X can be any amino acid
  VARIANT 114: note = X can be any amino acid
  VARIANT 116: note = X can be any amino acid
  VARIANT 117: note = X can be any amino acid
  VARIANT 121: note = X can be any amino acid
  VARIANT 122: note = X can be any amino acid
  VARIANT 125: note = X can be any amino acid
  VARIANT 126: note = X can be any amino acid
  VARIANT 128: note = X can be any amino acid
  VARIANT 129: note = X can be any amino acid
  VARIANT 132: note = X can be any amino acid
  VARIANT 133: note = X can be any amino acid
  VARIANT 134: note = X can be any amino acid
  VARIANT 135: note = X can be any amino acid
  VARIANT 136: note = X can be any amino acid
  VARIANT 137: note = X can be any amino acid
  VARIANT 139: note = X can be any amino acid
  VARIANT 140: note = X can be any amino acid
  VARIANT 141: note = X can be any amino acid
  VARIANT 142: note = X can be any amino acid
  VARIANT 143: note = X can be any amino acid
  VARIANT 144: note = X can be any amino acid
  VARIANT 149: note = X can be any amino acid
  VARIANT 152: note = X can be any amino acid
  VARIANT 154: note = X can be any amino acid
  VARIANT 156: note = X can be any amino acid
  VARIANT 157: note = X can be any amino acid
  VARIANT 158: note = X can be any amino acid
  VARIANT 159: note = X can be any amino acid
  VARIANT 160: note = X can be any amino acid
  VARIANT 161: note = X can be any amino acid
  VARIANT 162: note = X can be any amino acid
  VARIANT 163: note = X can be any amino acid
  VARIANT 164: note = X can be any amino acid
  VARIANT 165: note = X can be any amino acid
  VARIANT 166: note = X can be any amino acid
  VARIANT 167: note = X can be any amino acid
  VARIANT 168: note = X can be any amino acid
  VARIANT 169: note = X can be any amino acid
  VARIANT 170: note = X can be any amino acid
  VARIANT 171: note = X can be any amino acid
  VARIANT 172: note = X can be any amino acid
  VARIANT 174: note = X can be any amino acid
  VARIANT 175: note = X can be any amino acid
  VARIANT 176: note = X can be any amino acid
  VARIANT 177: note = X can be any amino acid
  VARIANT 178: note = X can be any amino acid
  VARIANT 179: note = X can be any amino acid
  VARIANT 180: note = X can be any amino acid
  VARIANT 181: note = X can be any amino acid
  VARIANT 182: note = X can be any amino acid
  VARIANT 183: note = X can be any amino acid
  VARIANT 185: note = X can be any amino acid
  VARIANT 186: note = X can be any amino acid
  VARIANT 188: note = X can be any amino acid
  VARIANT 190: note = X can be any amino acid
  VARIANT 191: note = X can be any amino acid
  VARIANT 192: note = X can be any amino acid
  VARIANT 193: note = X can be any amino acid
  VARIANT 195: note = X can be any amino acid
  VARIANT 196: note = X can be any amino acid
  VARIANT 197: note = X can be any amino acid
  VARIANT 199: note = X can be any amino acid
  VARIANT 202: note = X can be any amino acid
  VARIANT 203: note = X can be any amino acid
  VARIANT 207: note = X can be any amino acid
  VARIANT 209: note = X can be any amino acid
  VARIANT 210: note = X can be any amino acid
  VARIANT 211: note = X can be any amino acid
  VARIANT 212: note = X can be any amino acid
  VARIANT 213: note = X can be any amino acid
  VARIANT 214: note = X can be any amino acid
  VARIANT 215: note = X can be any amino acid
  VARIANT 216: note = X can be any amino acid
  VARIANT 218: note = X can be any amino acid
  VARIANT 219: note = X can be any amino acid
  VARIANT 220: note = X can be any amino acid
  VARIANT 222: note = X can be any amino acid
  VARIANT 223: note = X can be any amino acid
  VARIANT 224: note = X can be any amino acid
  VARIANT 225: note = X can be any amino acid
  VARIANT 226: note = X can be any amino acid
  VARIANT 227: note = X can be any amino acid
  VARIANT 228: note = X can be any amino acid
  VARIANT 229: note = X can be any amino acid
  VARIANT 230: note = X can be any amino acid
XXXXXXXXXXXXXXXXXLKXXXXFXXXXXXXXXXXXXXXVXSYRKGXXXXXAVXXHXXXXXFXXXDXXXFFXSIXXXXXXXXXXXXXXXXPXXDXXXXXXXXXXXXXXXXXLPXGXXTSPXXSNXXLXXFDXXXXXXCXXXXXXYTRYXDDXIXSXXXXXXXXXXXXXXXXXLXXXXXXXXXXNXXKXKXXXXGXXXKXLGXXILPXGXXXXXXXXKXXXEXXXXXXXXX

SEQ ID NO: 19367 - protein, 241 aa, synthetic construct
  VARIANT 1: note = X can be any amino acid
  VARIANT 2: note = X can be any amino acid
  VARIANT 3: note = X can be any amino acid
  VARIANT 4: note = X can be any amino acid
  VARIANT 5: note = X can be any amino acid
  VARIANT 6: note = X can be any amino acid
  VARIANT 7: note = X can be any amino acid
  VARIANT 8: note = X can be any amino acid
  VARIANT 9: note = X can be any amino acid
  VARIANT 10: note = X can be any amino acid
  VARIANT 11: note = X can be any amino acid
  VARIANT 12: note = X can be any amino acid
  VARIANT 13: note = X can be any amino acid
  VARIANT 14: note = X can be any amino acid
  VARIANT 15: note = X can be any amino acid
  VARIANT 16: note = X can be any amino acid
  VARIANT 17: note = X can be any amino acid
  VARIANT 18: note = X can be any amino acid
  VARIANT 19: note = X can be any amino acid
  VARIANT 20: note = X can be any amino acid
  VARIANT 21: note = X can be any amino acid
  VARIANT 22: note = X can be any amino acid
  VARIANT 23: note = X can be any amino acid
  VARIANT 24: note = X can be any amino acid
  VARIANT 25: note = X can be any amino acid
  VARIANT 26: note = X can be any amino acid
  VARIANT 27: note = X can be any amino acid
  VARIANT 28: note = X can be any amino acid
  VARIANT 29: note = X can be any amino acid
  VARIANT 30: note = X can be any amino acid
  VARIANT 31: note = X can be any amino acid
  VARIANT 32: note = X can be any amino acid
  VARIANT 33: note = X can be any amino acid
  VARIANT 34: note = X can be any amino acid
  VARIANT 35: note = X can be any amino acid
  VARIANT 36: note = X can be any amino acid
  VARIANT 37: note = X can be any amino acid
  VARIANT 38: note = X can be any amino acid
  VARIANT 39: note = X can be any amino acid
  VARIANT 40: note = X can be any amino acid
  VARIANT 41: note = X can be any amino acid
  VARIANT 42: note = X can be any amino acid
  VARIANT 43: note = X can be any amino acid
  VARIANT 44: note = X can be any amino acid
  VARIANT 45: note = X can be any amino acid
  VARIANT 46: note = X can be any amino acid
  VARIANT 47: note = X can be any amino acid
  VARIANT 48: note = X can be any amino acid
  VARIANT 49: note = X can be any amino acid
  VARIANT 50: note = X can be any amino acid
  VARIANT 51: note = X can be any amino acid
  VARIANT 54: note = X can be any amino acid
  VARIANT 55: note = X can be any amino acid
  VARIANT 56: note = X can be any amino acid
  VARIANT 57: note = X can be any amino acid
  VARIANT 58: note = X can be any amino acid
  VARIANT 59: note = X can be any amino acid
  VARIANT 61: note = X can be any amino acid
  VARIANT 62: note = X can be any amino acid
  VARIANT 63: note = X can be any amino acid
  VARIANT 64: note = X can be any amino acid
  VARIANT 65: note = X can be any amino acid
  VARIANT 66: note = X can be any amino acid
  VARIANT 67: note = X can be any amino acid
  VARIANT 69: note = X can be any amino acid
  VARIANT 72: note = X can be any amino acid
  VARIANT 73: note = X can be any amino acid
  VARIANT 76: note = X can be any amino acid
  VARIANT 79: note = X can be any amino acid
  VARIANT 80: note = X can be any amino acid
  VARIANT 81: note = X can be any amino acid
  VARIANT 82: note = X can be any amino acid
  VARIANT 83: note = X can be any amino acid
  VARIANT 84: note = X can be any amino acid
  VARIANT 85: note = X can be any amino acid
  VARIANT 86: note = X can be any amino acid
  VARIANT 87: note = X can be any amino acid
  VARIANT 88: note = X can be any amino acid
  VARIANT 89: note = X can be any amino acid
  VARIANT 90: note = X can be any amino acid
  VARIANT 91: note = X can be any amino acid
  VARIANT 92: note = X can be any amino acid
  VARIANT 93: note = X can be any amino acid
  VARIANT 94: note = X can be any amino acid
  VARIANT 95: note = X can be any amino acid
  VARIANT 96: note = X can be any amino acid
  VARIANT 97: note = X can be any amino acid
  VARIANT 98: note = X can be any amino acid
  VARIANT 99: note = X can be any amino acid
  VARIANT 100: note = X can be any amino acid
  VARIANT 101: note = X can be any amino acid
  VARIANT 102: note = X can be any amino acid
  VARIANT 103: note = X can be any amino acid
  VARIANT 104: note = X can be any amino acid
  VARIANT 105: note = X can be any amino acid
  VARIANT 106: note = X can be any amino acid
  VARIANT 107: note = X can be any amino acid
  VARIANT 108: note = X can be any amino acid
  VARIANT 109: note = X can be any amino acid
  VARIANT 110: note = X can be any amino acid
  VARIANT 111: note = X can be any amino acid
  VARIANT 112: note = X can be any amino acid
  VARIANT 113: note = X can be any amino acid
  VARIANT 114: note = X can be any amino acid
  VARIANT 115: note = X can be any amino acid
  VARIANT 116: note = X can be any amino acid
  VARIANT 117: note = X can be any amino acid
  VARIANT 118: note = X can be any amino acid
  VARIANT 119: note = X can be any amino acid
  VARIANT 120: note = X can be any amino acid
  VARIANT 121: note = X can be any amino acid
  VARIANT 122: note = X can be any amino acid
  VARIANT 123: note = X can be any amino acid
  VARIANT 124: note = X can be any amino acid
  VARIANT 126: note = X can be any amino acid
  VARIANT 128: note = X can be any amino acid
  VARIANT 129: note = X can be any amino acid
  VARIANT 130: note = X can be any amino acid
  VARIANT 133: note = X can be any amino acid
  VARIANT 134: note = X can be any amino acid
  VARIANT 137: note = X can be any amino acid
  VARIANT 138: note = X can be any amino acid
  VARIANT 141: note = X can be any amino acid
  VARIANT 142: note = X can be any amino acid
  VARIANT 144: note = X can be any amino acid
  VARIANT 145: note = X can be any amino acid
  VARIANT 147: note = X can be any amino acid
  VARIANT 148: note = X can be any amino acid
  VARIANT 149: note = X can be any amino acid
  VARIANT 151: note = X can be any amino acid
  VARIANT 152: note = X can be any amino acid
  VARIANT 153: note = X can be any amino acid
  VARIANT 154: note = X can be any amino acid
  VARIANT 155: note = X can be any amino acid
  VARIANT 156: note = X can be any amino acid
  VARIANT 158: note = X can be any amino acid
  VARIANT 164: note = X can be any amino acid
  VARIANT 168: note = X can be any amino acid
  VARIANT 169: note = X can be any amino acid
  VARIANT 170: note = X can be any amino acid
  VARIANT 171: note = X can be any amino acid
  VARIANT 172: note = X can be any amino acid
  VARIANT 173: note = X can be any amino acid
  VARIANT 174: note = X can be any amino acid
  VARIANT 175: note = X can be any amino acid
  VARIANT 176: note = X can be any amino acid
  VARIANT 177: note = X can be any amino acid
  VARIANT 178: note = X can be any amino acid
  VARIANT 179: note = X can be any amino acid
  VARIANT 181: note = X can be any amino acid
  VARIANT 182: note = X can be any amino acid
  VARIANT 183: note = X can be any amino acid
  VARIANT 185: note = X can be any amino acid
  VARIANT 186: note = X can be any amino acid
  VARIANT 187: note = X can be any amino acid
  VARIANT 188: note = X can be any amino acid
  VARIANT 189: note = X can be any amino acid
  VARIANT 190: note = X can be any amino acid
  VARIANT 191: note = X can be any amino acid
  VARIANT 192: note = X can be any amino acid
  VARIANT 193: note = X can be any amino acid
  VARIANT 194: note = X can be any amino acid
  VARIANT 195: note = X can be any amino acid
  VARIANT 197: note = X can be any amino acid
  VARIANT 198: note = X can be any amino acid
  VARIANT 200: note = X can be any amino acid
  VARIANT 201: note = X can be any amino acid
  VARIANT 202: note = X can be any amino acid
  VARIANT 203: note = X can be any amino acid
  VARIANT 204: note = X can be any amino acid
  VARIANT 205: note = X can be any amino acid
  VARIANT 206: note = X can be any amino acid
  VARIANT 207: note = X can be any amino acid
  VARIANT 212: note = X can be any amino acid
  VARIANT 213: note = X can be any amino acid
  VARIANT 214: note = X can be any amino acid
  VARIANT 215: note = X can be any amino acid
  VARIANT 216: note = X can be any amino acid
  VARIANT 217: note = X can be any amino acid
  VARIANT 218: note = X can be any amino acid
  VARIANT 219: note = X can be any amino acid
  VARIANT 220: note = X can be any amino acid
  VARIANT 221: note = X can be any amino acid
  VARIANT 222: note = X can be any amino acid
  VARIANT 223: note = X can be any amino acid
  VARIANT 225: note = X can be any amino acid
  VARIANT 226: note = X can be any amino acid
  VARIANT 228: note = X can be any amino acid
  VARIANT 229: note = X can be any amino acid
  VARIANT 230: note = X can be any amino acid
  VARIANT 231: note = X can be any amino acid
  VARIANT 232: note = X can be any amino acid
  VARIANT 233: note = X can be any amino acid
  VARIANT 234: note = X can be any amino acid
  VARIANT 235: note = X can be any amino acid
  VARIANT 236: note = X can be any amino acid
  VARIANT 237: note = X can be any amino acid
  VARIANT 238: note = X can be any amino acid
  VARIANT 239: note = X can be any amino acid
  VARIANT 240: note = X can be any amino acid
  VARIANT 241: note = X can be any amino acid
XXXXXXXXXXXXXXXXXXXXXXXXXXXXXXXXXXXXXXXXXXXXXXXXXXXSYXXXXXXHXXXXXXXRXDIXXFFXSIXXXXXXXXXXXXXXXXXXXXXXXXXXXXXXXXXXXXXXXXXXXXXXPXGXXXSPXXSNXXFRXXDXXIXXXCXXXXXXYXRYADDXLFSXXXXXXXXXXXXFXXXIXXXXXXXXXXXNXXKXXXXXXXXSLNGXXXXXXXXXXXXSXXKXXXXXXXXXXXXXX

SEQ ID NO: 19368 - protein, 244 aa, synthetic construct
  VARIANT 2: note = X can be any amino acid
  VARIANT 3: note = X can be any amino acid
  VARIANT 5: note = X can be any amino acid
  VARIANT 7: note = X can be any amino acid
  VARIANT 9: note = X can be any amino acid
  VARIANT 10: note = X can be any amino acid
  VARIANT 12: note = X can be any amino acid
  VARIANT 13: note = X can be any amino acid
  VARIANT 15: note = X can be any amino acid
  VARIANT 17: note = X can be any amino acid
  VARIANT 20: note = X can be any amino acid
  VARIANT 21: note = X can be any amino acid
  VARIANT 22: note = X can be any amino acid
  VARIANT 25: note = X can be any amino acid
  VARIANT 26: note = X can be any amino acid
  VARIANT 28: note = X can be any amino acid
  VARIANT 29: note = X can be any amino acid
  VARIANT 31: note = X can be any amino acid
  VARIANT 32: note = X can be any amino acid
  VARIANT 33: note = X can be any amino acid
  VARIANT 35: note = X can be any amino acid
  VARIANT 36: note = X can be any amino acid
  VARIANT 37: note = X can be any amino acid
  VARIANT 38: note = X can be any amino acid
  VARIANT 39: note = X can be any amino acid
  VARIANT 40: note = X can be any amino acid
  VARIANT 41: note = X can be any amino acid
  VARIANT 42: note = X can be any amino acid
  VARIANT 43: note = X can be any amino acid
  VARIANT 44: note = X can be any amino acid
  VARIANT 45: note = X can be any amino acid
  VARIANT 46: note = X can be any amino acid
  VARIANT 47: note = X can be any amino acid
  VARIANT 48: note = X can be any amino acid
  VARIANT 49: note = X can be any amino acid
  VARIANT 50: note = X can be any amino acid
  VARIANT 51: note = X can be any amino acid
  VARIANT 52: note = X can be any amino acid
  VARIANT 54: note = X can be any amino acid
  VARIANT 56: note = X can be any amino acid
  VARIANT 57: note = X can be any amino acid
  VARIANT 58: note = X can be any amino acid
  VARIANT 59: note = X can be any amino acid
  VARIANT 60: note = X can be any amino acid
  VARIANT 62: note = X can be any amino acid
  VARIANT 63: note = X can be any amino acid
  VARIANT 66: note = X can be any amino acid
  VARIANT 67: note = X can be any amino acid
  VARIANT 69: note = X can be any amino acid
  VARIANT 70: note = X can be any amino acid
  VARIANT 71: note = X can be any amino acid
  VARIANT 72: note = X can be any amino acid
  VARIANT 73: note = X can be any amino acid
  VARIANT 75: note = X can be any amino acid
  VARIANT 77: note = X can be any amino acid
  VARIANT 80: note = X can be any amino acid
  VARIANT 81: note = X can be any amino acid
  VARIANT 84: note = X can be any amino acid
  VARIANT 85: note = X can be any amino acid
  VARIANT 86: note = X can be any amino acid
  VARIANT 87: note = X can be any amino acid
  VARIANT 92: note = X can be any amino acid
  VARIANT 94: note = X can be any amino acid
  VARIANT 96: note = X can be any amino acid
  VARIANT 97: note = X can be any amino acid
  VARIANT 98: note = X can be any amino acid
  VARIANT 99: note = X can be any amino acid
  VARIANT 100: note = X can be any amino acid
  VARIANT 102: note = X can be any amino acid
  VARIANT 103: note = X can be any amino acid
  VARIANT 104: note = X can be any amino acid
  VARIANT 105: note = X can be any amino acid
  VARIANT 106: note = X can be any amino acid
  VARIANT 107: note = X can be any amino acid
  VARIANT 109: note = X can be any amino acid
  VARIANT 110: note = X can be any amino acid
  VARIANT 111: note = X can be any amino acid
  VARIANT 114: note = X can be any amino acid
  VARIANT 115: note = X can be any amino acid
  VARIANT 117: note = X can be any amino acid
  VARIANT 118: note = X can be any amino acid
  VARIANT 119: note = X can be any amino acid
  VARIANT 120: note = X can be any amino acid
  VARIANT 125: note = X can be any amino acid
  VARIANT 127: note = X can be any amino acid
  VARIANT 130: note = X can be any amino acid
  VARIANT 132: note = X can be any amino acid
  VARIANT 134: note = X can be any amino acid
  VARIANT 136: note = X can be any amino acid
  VARIANT 137: note = X can be any amino acid
  VARIANT 138: note = X can be any amino acid
  VARIANT 141: note = X can be any amino acid
  VARIANT 142: note = X can be any amino acid
  VARIANT 143: note = X can be any amino acid
  VARIANT 144: note = X can be any amino acid
  VARIANT 145: note = X can be any amino acid
  VARIANT 146: note = X can be any amino acid
  VARIANT 148: note = X can be any amino acid
  VARIANT 149: note = X can be any amino acid
  VARIANT 150: note = X can be any amino acid
  VARIANT 151: note = X can be any amino acid
  VARIANT 152: note = X can be any amino acid
  VARIANT 153: note = X can be any amino acid
  VARIANT 155: note = X can be any amino acid
  VARIANT 161: note = X can be any amino acid
  VARIANT 166: note = X can be any amino acid
  VARIANT 167: note = X can be any amino acid
  VARIANT 168: note = X can be any amino acid
  VARIANT 169: note = X can be any amino acid
  VARIANT 170: note = X can be any amino acid
  VARIANT 171: note = X can be any amino acid
  VARIANT 172: note = X can be any amino acid
  VARIANT 173: note = X can be any amino acid
  VARIANT 174: note = X can be any amino acid
  VARIANT 175: note = X can be any amino acid
  VARIANT 176: note = X can be any amino acid
  VARIANT 177: note = X can be any amino acid
  VARIANT 178: note = X can be any amino acid
  VARIANT 179: note = X can be any amino acid
  VARIANT 180: note = X can be any amino acid
  VARIANT 181: note = X can be any amino acid
  VARIANT 182: note = X can be any amino acid
  VARIANT 183: note = X can be any amino acid
  VARIANT 184: note = X can be any amino acid
  VARIANT 185: note = X can be any amino acid
  VARIANT 186: note = X can be any amino acid
  VARIANT 187: note = X can be any amino acid
  VARIANT 188: note = X can be any amino acid
  VARIANT 189: note = X can be any amino acid
  VARIANT 190: note = X can be any amino acid
  VARIANT 191: note = X can be any amino acid
  VARIANT 192: note = X can be any amino acid
  VARIANT 193: note = X can be any amino acid
  VARIANT 194: note = X can be any amino acid
  VARIANT 195: note = X can be any amino acid
  VARIANT 198: note = X can be any amino acid
  VARIANT 199: note = X can be any amino acid
  VARIANT 201: note = X can be any amino acid
  VARIANT 202: note = X can be any amino acid
  VARIANT 206: note = X can be any amino acid
  VARIANT 207: note = X can be any amino acid
  VARIANT 208: note = X can be any amino acid
  VARIANT 209: note = X can be any amino acid
  VARIANT 210: note = X can be any amino acid
  VARIANT 211: note = X can be any amino acid
  VARIANT 214: note = X can be any amino acid
  VARIANT 219: note = X can be any amino acid
  VARIANT 222: note = X can be any amino acid
  VARIANT 223: note = X can be any amino acid
  VARIANT 224: note = X can be any amino acid
  VARIANT 226: note = X can be any amino acid
  VARIANT 227: note = X can be any amino acid
  VARIANT 228: note = X can be any amino acid
  VARIANT 229: note = X can be any amino acid
  VARIANT 231: note = X can be any amino acid
  VARIANT 232: note = X can be any amino acid
  VARIANT 233: note = X can be any amino acid
  VARIANT 234: note = X can be any amino acid
  VARIANT 236: note = X can be any amino acid
  VARIANT 237: note = X can be any amino acid
  VARIANT 238: note = X can be any amino acid
  VARIANT 239: note = X can be any amino acid
  VARIANT 240: note = X can be any amino acid
  VARIANT 241: note = X can be any amino acid
  VARIANT 242: note = X can be any amino acid
  VARIANT 243: note = X can be any amino acid
  VARIANT 244: note = X can be any amino acid
YXXFXIXKXXGXXRXIXAPXXXLKXXQXXLXXXLXXXXXXXXXXXXXXXXXXHXFXXXXXIXXNAXXHXXXXXVXNXDLXXFFXXXXFGRVXGXFXXXXXFXXXXXXAXXXAQXXCXXXXLPQGXPXSPXIXNXIXXXLDXXXXXXAXXXXXXYXRYADDXTFSTXXXXXXXXXXXXXXXXXXXXXXXXXXXXXXGFXXNXXKTRXXXXXXRQXVTGLXVNXXXNXXXXYXXXXRXXXXXXXXX

SEQ ID NO: 19369 - protein, 233 aa, synthetic construct
  VARIANT 2: note = X can be any amino acid
  VARIANT 3: note = X can be any amino acid
  VARIANT 4: note = X can be any amino acid
  VARIANT 5: note = X can be any amino acid
  VARIANT 6: note = X can be any amino acid
  VARIANT 7: note = X can be any amino acid
  VARIANT 10: note = X can be any amino acid
  VARIANT 13: note = X can be any amino acid
  VARIANT 15: note = X can be any amino acid
  VARIANT 17: note = X can be any amino acid
  VARIANT 18: note = X can be any amino acid
  VARIANT 20: note = X can be any amino acid
  VARIANT 21: note = X can be any amino acid
  VARIANT 22: note = X can be any amino acid
  VARIANT 24: note = X can be any amino acid
  VARIANT 25: note = X can be any amino acid
  VARIANT 26: note = X can be any amino acid
  VARIANT 28: note = X can be any amino acid
  VARIANT 29: note = X can be any amino acid
  VARIANT 31: note = X can be any amino acid
  VARIANT 32: note = X can be any amino acid
  VARIANT 33: note = X can be any amino acid
  VARIANT 35: note = X can be any amino acid
  VARIANT 36: note = X can be any amino acid
  VARIANT 37: note = X can be any amino acid
  VARIANT 39: note = X can be any amino acid
  VARIANT 40: note = X can be any amino acid
  VARIANT 41: note = X can be any amino acid
  VARIANT 42: note = X can be any amino acid
  VARIANT 43: note = X can be any amino acid
  VARIANT 44: note = X can be any amino acid
  VARIANT 45: note = X can be any amino acid
  VARIANT 46: note = X can be any amino acid
  VARIANT 47: note = X can be any amino acid
  VARIANT 50: note = X can be any amino acid
  VARIANT 51: note = X can be any amino acid
  VARIANT 52: note = X can be any amino acid
  VARIANT 53: note = X can be any amino acid
  VARIANT 54: note = X can be any amino acid
  VARIANT 55: note = X can be any amino acid
  VARIANT 56: note = X can be any amino acid
  VARIANT 57: note = X can be any amino acid
  VARIANT 58: note = X can be any amino acid
  VARIANT 59: note = X can be any amino acid
  VARIANT 60: note = X can be any amino acid
  VARIANT 61: note = X can be any amino acid
  VARIANT 63: note = X can be any amino acid
  VARIANT 64: note = X can be any amino acid
  VARIANT 67: note = X can be any amino acid
  VARIANT 68: note = X can be any amino acid
  VARIANT 70: note = X can be any amino acid
  VARIANT 71: note = X can be any amino acid
  VARIANT 73: note = X can be any amino acid
  VARIANT 74: note = X can be any amino acid
  VARIANT 75: note = X can be any amino acid
  VARIANT 78: note = X can be any amino acid
  VARIANT 80: note = X can be any amino acid
  VARIANT 81: note = X can be any amino acid
  VARIANT 82: note = X can be any amino acid
  VARIANT 85: note = X can be any amino acid
  VARIANT 88: note = X can be any amino acid
  VARIANT 89: note = X can be any amino acid
  VARIANT 90: note = X can be any amino acid
  VARIANT 91: note = X can be any amino acid
  VARIANT 92: note = X can be any amino acid
  VARIANT 93: note = X can be any amino acid
  VARIANT 94: note = X can be any amino acid
  VARIANT 95: note = X can be any amino acid
  VARIANT 96: note = X can be any amino acid
  VARIANT 97: note = X can be any amino acid
  VARIANT 98: note = X can be any amino acid
  VARIANT 99: note = X can be any amino acid
  VARIANT 100: note = X can be any amino acid
  VARIANT 102: note = X can be any amino acid
  VARIANT 103: note = X can be any amino acid
  VARIANT 104: note = X can be any amino acid
  VARIANT 105: note = X can be any amino acid
  VARIANT 106: note = X can be any amino acid
  VARIANT 107: note = X can be any amino acid
  VARIANT 109: note = X can be any amino acid
  VARIANT 110: note = X can be any amino acid
  VARIANT 111: note = X can be any amino acid
  VARIANT 112: note = X can be any amino acid
  VARIANT 115: note = X can be any amino acid
  VARIANT 117: note = X can be any amino acid
  VARIANT 118: note = X can be any amino acid
  VARIANT 119: note = X can be any amino acid
  VARIANT 120: note = X can be any amino acid
  VARIANT 123: note = X can be any amino acid
  VARIANT 127: note = X can be any amino acid
  VARIANT 130: note = X can be any amino acid
  VARIANT 131: note = X can be any amino acid
  VARIANT 134: note = X can be any amino acid
  VARIANT 135: note = X can be any amino acid
  VARIANT 137: note = X can be any amino acid
  VARIANT 138: note = X can be any amino acid
  VARIANT 139: note = X can be any amino acid
  VARIANT 141: note = X can be any amino acid
  VARIANT 142: note = X can be any amino acid
  VARIANT 144: note = X can be any amino acid
  VARIANT 145: note = X can be any amino acid
  VARIANT 146: note = X can be any amino acid
  VARIANT 147: note = X can be any amino acid
  VARIANT 148: note = X can be any amino acid
  VARIANT 149: note = X can be any amino acid
  VARIANT 150: note = X can be any amino acid
  VARIANT 151: note = X can be any amino acid
  VARIANT 152: note = X can be any amino acid
  VARIANT 153: note = X can be any amino acid
  VARIANT 155: note = X can be any amino acid
  VARIANT 165: note = X can be any amino acid
  VARIANT 166: note = X can be any amino acid
  VARIANT 167: note = X can be any amino acid
  VARIANT 168: note = X can be any amino acid
  VARIANT 169: note = X can be any amino acid
  VARIANT 170: note = X can be any amino acid
  VARIANT 171: note = X can be any amino acid
  VARIANT 172: note = X can be any amino acid
  VARIANT 173: note = X can be any amino acid
  VARIANT 174: note = X can be any amino acid
  VARIANT 175: note = X can be any amino acid
  VARIANT 176: note = X can be any amino acid
  VARIANT 177: note = X can be any amino acid
  VARIANT 178: note = X can be any amino acid
  VARIANT 179: note = X can be any amino acid
  VARIANT 180: note = X can be any amino acid
  VARIANT 182: note = X can be any amino acid
  VARIANT 183: note = X can be any amino acid
  VARIANT 184: note = X can be any amino acid
  VARIANT 185: note = X can be any amino acid
  VARIANT 187: note = X can be any amino acid
  VARIANT 188: note = X can be any amino acid
  VARIANT 190: note = X can be any amino acid
  VARIANT 193: note = X can be any amino acid
  VARIANT 195: note = X can be any amino acid
  VARIANT 196: note = X can be any amino acid
  VARIANT 197: note = X can be any amino acid
  VARIANT 198: note = X can be any amino acid
  VARIANT 199: note = X can be any amino acid
  VARIANT 200: note = X can be any amino acid
  VARIANT 201: note = X can be any amino acid
  VARIANT 203: note = X can be any amino acid
  VARIANT 207: note = X can be any amino acid
  VARIANT 208: note = X can be any amino acid
  VARIANT 211: note = X can be any amino acid
  VARIANT 213: note = X can be any amino acid
  VARIANT 215: note = X can be any amino acid
  VARIANT 216: note = X can be any amino acid
  VARIANT 218: note = X can be any amino acid
  VARIANT 219: note = X can be any amino acid
  VARIANT 220: note = X can be any amino acid
  VARIANT 221: note = X can be any amino acid
  VARIANT 222: note = X can be any amino acid
  VARIANT 223: note = X can be any amino acid
  VARIANT 226: note = X can be any amino acid
  VARIANT 227: note = X can be any amino acid
  VARIANT 229: note = X can be any amino acid
  VARIANT 230: note = X can be any amino acid
  VARIANT 231: note = X can be any amino acid
  VARIANT 232: note = X can be any amino acid
  VARIANT 233: note = X can be any amino acid
YXXXXXXKKXGGXRXIXXPXXXLXXXQXXLXXXLXXXYXXXXXXXXXGFXXXXXXXXXXXXIXXNAXXHXXKXXXLNXDXXXFFXSIXXXXXXXXXXXXXFXXXXXXAXXXXLLXTXXXXLPXGAPXSPXXSNXXCXXXDXXLXXXXXXXXXXYXRYADDLTFSXXXXXXXXXXXXXXXXIXXXXFXXNXKKXRXXXXXXXQXVTGXXVNXKXNXXRXXXXXXRAXXHXXXXX

SEQ ID NO: 19370 - protein, 237 aa, synthetic construct
  VARIANT 3: note = X can be any amino acid
  VARIANT 4: note = X can be any amino acid
  VARIANT 5: note = X can be any amino acid
  VARIANT 7: note = X can be any amino acid
  VARIANT 9: note = X can be any amino acid
  VARIANT 10: note = X can be any amino acid
  VARIANT 12: note = X can be any amino acid
  VARIANT 13: note = X can be any amino acid
  VARIANT 15: note = X can be any amino acid
  VARIANT 17: note = X can be any amino acid
  VARIANT 18: note = X can be any amino acid
  VARIANT 20: note = X can be any amino acid
  VARIANT 21: note = X can be any amino acid
  VARIANT 22: note = X can be any amino acid
  VARIANT 23: note = X can be any amino acid
  VARIANT 25: note = X can be any amino acid
  VARIANT 26: note = X can be any amino acid
  VARIANT 28: note = X can be any amino acid
  VARIANT 29: note = X can be any amino acid
  VARIANT 30: note = X can be any amino acid
  VARIANT 31: note = X can be any amino acid
  VARIANT 32: note = X can be any amino acid
  VARIANT 33: note = X can be any amino acid
  VARIANT 34: note = X can be any amino acid
  VARIANT 35: note = X can be any amino acid
  VARIANT 36: note = X can be any amino acid
  VARIANT 37: note = X can be any amino acid
  VARIANT 38: note = X can be any amino acid
  VARIANT 39: note = X can be any amino acid
  VARIANT 40: note = X can be any amino acid
  VARIANT 42: note = X can be any amino acid
  VARIANT 43: note = X can be any amino acid
  VARIANT 45: note = X can be any amino acid
  VARIANT 48: note = X can be any amino acid
  VARIANT 49: note = X can be any amino acid
  VARIANT 50: note = X can be any amino acid
  VARIANT 51: note = X can be any amino acid
  VARIANT 52: note = X can be any amino acid
  VARIANT 54: note = X can be any amino acid
  VARIANT 55: note = X can be any amino acid
  VARIANT 58: note = X can be any amino acid
  VARIANT 59: note = X can be any amino acid
  VARIANT 61: note = X can be any amino acid
  VARIANT 62: note = X can be any amino acid
  VARIANT 63: note = X can be any amino acid
  VARIANT 64: note = X can be any amino acid
  VARIANT 65: note = X can be any amino acid
  VARIANT 66: note = X can be any amino acid
  VARIANT 67: note = X can be any amino acid
  VARIANT 68: note = X can be any amino acid
  VARIANT 69: note = X can be any amino acid
  VARIANT 72: note = X can be any amino acid
  VARIANT 73: note = X can be any amino acid
  VARIANT 76: note = X can be any amino acid
  VARIANT 79: note = X can be any amino acid
  VARIANT 80: note = X can be any amino acid
  VARIANT 81: note = X can be any amino acid
  VARIANT 82: note = X can be any amino acid
  VARIANT 83: note = X can be any amino acid
  VARIANT 84: note = X can be any amino acid
  VARIANT 85: note = X can be any amino acid
  VARIANT 86: note = X can be any amino acid
  VARIANT 87: note = X can be any amino acid
  VARIANT 88: note = X can be any amino acid
  VARIANT 89: note = X can be any amino acid
  VARIANT 90: note = X can be any amino acid
  VARIANT 91: note = X can be any amino acid
  VARIANT 92: note = X can be any amino acid
  VARIANT 93: note = X can be any amino acid
  VARIANT 94: note = X can be any amino acid
  VARIANT 95: note = X can be any amino acid
  VARIANT 96: note = X can be any amino acid
  VARIANT 97: note = X can be any amino acid
  VARIANT 98: note = X can be any amino acid
  VARIANT 99: note = X can be any amino acid
  VARIANT 100: note = X can be any amino acid
  VARIANT 101: note = X can be any amino acid
  VARIANT 102: note = X can be any amino acid
  VARIANT 103: note = X can be any amino acid
  VARIANT 104: note = X can be any amino acid
  VARIANT 105: note = X can be any amino acid
  VARIANT 106: note = X can be any amino acid
  VARIANT 107: note = X can be any amino acid
  VARIANT 108: note = X can be any amino acid
  VARIANT 109: note = X can be any amino acid
  VARIANT 110: note = X can be any amino acid
  VARIANT 111: note = X can be any amino acid
  VARIANT 112: note = X can be any amino acid
  VARIANT 113: note = X can be any amino acid
  VARIANT 114: note = X can be any amino acid
  VARIANT 115: note = X can be any amino acid
  VARIANT 116: note = X can be any amino acid
  VARIANT 117: note = X can be any amino acid
  VARIANT 118: note = X can be any amino acid
  VARIANT 120: note = X can be any amino acid
  VARIANT 123: note = X can be any amino acid
  VARIANT 125: note = X can be any amino acid
  VARIANT 128: note = X can be any amino acid
  VARIANT 129: note = X can be any amino acid
  VARIANT 132: note = X can be any amino acid
  VARIANT 133: note = X can be any amino acid
  VARIANT 134: note = X can be any amino acid
  VARIANT 135: note = X can be any amino acid
  VARIANT 136: note = X can be any amino acid
  VARIANT 137: note = X can be any amino acid
  VARIANT 139: note = X can be any amino acid
  VARIANT 140: note = X can be any amino acid
  VARIANT 141: note = X can be any amino acid
  VARIANT 142: note = X can be any amino acid
  VARIANT 143: note = X can be any amino acid
  VARIANT 144: note = X can be any amino acid
  VARIANT 145: note = X can be any amino acid
  VARIANT 146: note = X can be any amino acid
  VARIANT 147: note = X can be any amino acid
  VARIANT 148: note = X can be any amino acid
  VARIANT 149: note = X can be any amino acid
  VARIANT 150: note = X can be any amino acid
  VARIANT 151: note = X can be any amino acid
  VARIANT 153: note = X can be any amino acid
  VARIANT 159: note = X can be any amino acid
  VARIANT 160: note = X can be any amino acid
  VARIANT 161: note = X can be any amino acid
  VARIANT 163: note = X can be any amino acid
  VARIANT 164: note = X can be any amino acid
  VARIANT 165: note = X can be any amino acid
  VARIANT 166: note = X can be any amino acid
  VARIANT 167: note = X can be any amino acid
  VARIANT 168: note = X can be any amino acid
  VARIANT 169: note = X can be any amino acid
  VARIANT 170: note = X can be any amino acid
  VARIANT 171: note = X can be any amino acid
  VARIANT 172: note = X can be any amino acid
  VARIANT 173: note = X can be any amino acid
  VARIANT 174: note = X can be any amino acid
  VARIANT 175: note = X can be any amino acid
  VARIANT 176: note = X can be any amino acid
  VARIANT 177: note = X can be any amino acid
  VARIANT 178: note = X can be any amino acid
  VARIANT 179: note = X can be any amino acid
  VARIANT 180: note = X can be any amino acid
  VARIANT 181: note = X can be any amino acid
  VARIANT 182: note = X can be any amino acid
  VARIANT 183: note = X can be any amino acid
  VARIANT 184: note = X can be any amino acid
  VARIANT 185: note = X can be any amino acid
  VARIANT 186: note = X can be any amino acid
  VARIANT 187: note = X can be any amino acid
  VARIANT 188: note = X can be any amino acid
  VARIANT 189: note = X can be any amino acid
  VARIANT 190: note = X can be any amino acid
  VARIANT 192: note = X can be any amino acid
  VARIANT 193: note = X can be any amino acid
  VARIANT 196: note = X can be any amino acid
  VARIANT 197: note = X can be any amino acid
  VARIANT 198: note = X can be any amino acid
  VARIANT 199: note = X can be any amino acid
  VARIANT 200: note = X can be any amino acid
  VARIANT 201: note = X can be any amino acid
  VARIANT 202: note = X can be any amino acid
  VARIANT 203: note = X can be any amino acid
  VARIANT 204: note = X can be any amino acid
  VARIANT 205: note = X can be any amino acid
  VARIANT 206: note = X can be any amino acid
  VARIANT 209: note = X can be any amino acid
  VARIANT 210: note = X can be any amino acid
  VARIANT 211: note = X can be any amino acid
  VARIANT 212: note = X can be any amino acid
  VARIANT 213: note = X can be any amino acid
  VARIANT 214: note = X can be any amino acid
  VARIANT 215: note = X can be any amino acid
  VARIANT 216: note = X can be any amino acid
  VARIANT 217: note = X can be any amino acid
  VARIANT 218: note = X can be any amino acid
  VARIANT 219: note = X can be any amino acid
  VARIANT 222: note = X can be any amino acid
  VARIANT 223: note = X can be any amino acid
  VARIANT 226: note = X can be any amino acid
  VARIANT 227: note = X can be any amino acid
  VARIANT 228: note = X can be any amino acid
  VARIANT 229: note = X can be any amino acid
  VARIANT 230: note = X can be any amino acid
  VARIANT 231: note = X can be any amino acid
  VARIANT 232: note = X can be any amino acid
  VARIANT 233: note = X can be any amino acid
  VARIANT 234: note = X can be any amino acid
  VARIANT 235: note = X can be any amino acid
  VARIANT 236: note = X can be any amino acid
  VARIANT 237: note = X can be any amino acid
YKXXXIXKXXGXXRXIXXPXXXXKXXQXXXXXXXXXXXXXHXXAXAYXXXXXIXXNAXXHXXXXXXXXXDFXXFFXSIXXXXXXXXXXXXXXXXXXXXXXXXXXXXXXXXXXXXXXXXLXIGXPXSPXXSNXXXXXXDXXXXXXXXXXXXXYXRYADDXXXSXXXXXXXXXXXXXXXXXXXXXXXXXXXXNXXKTXXXXXXXXXXXTGXXXXXXXXXXXGRXXKRXXXXXXXXXXXX

SEQ ID NO: 19371 - protein, 233 aa, synthetic construct; identical to SEQ ID NO: 19369
  VARIANT 2: note = X can be any amino acid
  VARIANT 3: note = X can be any amino acid
  VARIANT 4: note = X can be any amino acid
  VARIANT 5: note = X can be any amino acid
  VARIANT 6: note = X can be any amino acid
  VARIANT 7: note = X can be any amino acid
  VARIANT 10: note = X can be any amino acid
  VARIANT 13: note = X can be any amino acid
  VARIANT 15: note = X can be any amino acid
  VARIANT 17: note = X can be any amino acid
  VARIANT 18: note = X can be any amino acid
  VARIANT 20: note = X can be any amino acid
  VARIANT 21: note = X can be any amino acid
  VARIANT 22: note = X can be any amino acid
  VARIANT 24: note = X can be any amino acid
  VARIANT 25: note = X can be any amino acid
  VARIANT 26: note = X can be any amino acid
  VARIANT 28: note = X can be any amino acid
  VARIANT 29: note = X can be any amino acid
  VARIANT 31: note = X can be any amino acid
  VARIANT 32: note = X can be any amino acid
  VARIANT 33: note = X can be any amino acid
  VARIANT 35: note = X can be any amino acid
  VARIANT 36: note = X can be any amino acid
  VARIANT 37: note = X can be any amino acid
  VARIANT 39: note = X can be any amino acid
  VARIANT 40: note = X can be any amino acid
  VARIANT 41: note = X can be any amino acid
  VARIANT 42: note = X can be any amino acid
  VARIANT 43: note = X can be any amino acid
  VARIANT 44: note = X can be any amino acid
  VARIANT 45: note = X can be any amino acid
  VARIANT 46: note = X can be any amino acid
  VARIANT 47: note = X can be any amino acid
  VARIANT 50: note = X can be any amino acid
  VARIANT 51: note = X can be any amino acid
  VARIANT 52: note = X can be any amino acid
  VARIANT 53: note = X can be any amino acid
  VARIANT 54: note = X can be any amino acid
  VARIANT 55: note = X can be any amino acid
  VARIANT 56: note = X can be any amino acid
  VARIANT 57: note = X can be any amino acid
  VARIANT 58: note = X can be any amino acid
  VARIANT 59: note = X can be any amino acid
  VARIANT 60: note = X can be any amino acid
  VARIANT 61: note = X can be any amino acid
  VARIANT 63: note = X can be any amino acid
  VARIANT 64: note = X can be any amino acid
  VARIANT 67: note = X can be any amino acid
  VARIANT 68: note = X can be any amino acid
  VARIANT 70: note = X can be any amino acid
  VARIANT 71: note = X can be any amino acid
  VARIANT 73: note = X can be any amino acid
  VARIANT 74: note = X can be any amino acid
  VARIANT 75: note = X can be any amino acid
  VARIANT 78: note = X can be any amino acid
  VARIANT 80: note = X can be any amino acid
  VARIANT 81: note = X can be any amino acid
  VARIANT 82: note = X can be any amino acid
  VARIANT 85: note = X can be any amino acid
  VARIANT 88: note = X can be any amino acid
  VARIANT 89: note = X can be any amino acid
  VARIANT 90: note = X can be any amino acid
  VARIANT 91: note = X can be any amino acid
  VARIANT 92: note = X can be any amino acid
  VARIANT 93: note = X can be any amino acid
  VARIANT 94: note = X can be any amino acid
  VARIANT 95: note = X can be any amino acid
  VARIANT 96: note = X can be any amino acid
  VARIANT 97: note = X can be any amino acid
  VARIANT 98: note = X can be any amino acid
  VARIANT 99: note = X can be any amino acid
  VARIANT 100: note = X can be any amino acid
  VARIANT 102: note = X can be any amino acid
  VARIANT 103: note = X can be any amino acid
  VARIANT 104: note = X can be any amino acid
  VARIANT 105: note = X can be any amino acid
  VARIANT 106: note = X can be any amino acid
  VARIANT 107: note = X can be any amino acid
  VARIANT 109: note = X can be any amino acid
  VARIANT 110: note = X can be any amino acid
  VARIANT 111: note = X can be any amino acid
  VARIANT 112: note = X can be any amino acid
  VARIANT 115: note = X can be any amino acid
  VARIANT 117: note = X can be any amino acid
  VARIANT 118: note = X can be any amino acid
  VARIANT 119: note = X can be any amino acid
  VARIANT 120: note = X can be any amino acid
  VARIANT 123: note = X can be any amino acid
  VARIANT 127: note = X can be any amino acid
  VARIANT 130: note = X can be any amino acid
  VARIANT 131: note = X can be any amino acid
  VARIANT 134: note = X can be any amino acid
  VARIANT 135: note = X can be any amino acid
  VARIANT 137: note = X can be any amino acid
  VARIANT 138: note = X can be any amino acid
  VARIANT 139: note = X can be any amino acid
  VARIANT 141: note = X can be any amino acid
  VARIANT 142: note = X can be any amino acid
  VARIANT 144: note = X can be any amino acid
  VARIANT 145: note = X can be any amino acid
  VARIANT 146: note = X can be any amino acid
  VARIANT 147: note = X can be any amino acid
  VARIANT 148: note = X can be any amino acid
  VARIANT 149: note = X can be any amino acid
  VARIANT 150: note = X can be any amino acid
  VARIANT 151: note = X can be any amino acid
  VARIANT 152: note = X can be any amino acid
  VARIANT 153: note = X can be any amino acid
  VARIANT 155: note = X can be any amino acid
  VARIANT 165: note = X can be any amino acid
  VARIANT 166: note = X can be any amino acid
  VARIANT 167: note = X can be any amino acid
  VARIANT 168: note = X can be any amino acid
  VARIANT 169: note = X can be any amino acid
  VARIANT 170: note = X can be any amino acid
  VARIANT 171: note = X can be any amino acid
  VARIANT 172: note = X can be any amino acid
  VARIANT 173: note = X can be any amino acid
  VARIANT 174: note = X can be any amino acid
  VARIANT 175: note = X can be any amino acid
  VARIANT 176: note = X can be any amino acid
  VARIANT 177: note = X can be any amino acid
  VARIANT 178: note = X can be any amino acid
  VARIANT 179: note = X can be any amino acid
  VARIANT 180: note = X can be any amino acid
  VARIANT 182: note = X can be any amino acid
  VARIANT 183: note = X can be any amino acid
  VARIANT 184: note = X can be any amino acid
  VARIANT 185: note = X can be any amino acid
  VARIANT 187: note = X can be any amino acid
  VARIANT 188: note = X can be any amino acid
  VARIANT 190: note = X can be any amino acid
  VARIANT 193: note = X can be any amino acid
  VARIANT 195: note = X can be any amino acid
  VARIANT 196: note = X can be any amino acid
  VARIANT 197: note = X can be any amino acid
  VARIANT 198: note = X can be any amino acid
  VARIANT 199: note = X can be any amino acid
  VARIANT 200: note = X can be any amino acid
  VARIANT 201: note = X can be any amino acid
  VARIANT 203: note = X can be any amino acid
  VARIANT 207: note = X can be any amino acid
  VARIANT 208: note = X can be any amino acid
  VARIANT 211: note = X can be any amino acid
  VARIANT 213: note = X can be any amino acid
  VARIANT 215: note = X can be any amino acid
  VARIANT 216: note = X can be any amino acid
  VARIANT 218: note = X can be any amino acid
  VARIANT 219: note = X can be any amino acid
  VARIANT 220: note = X can be any amino acid
  VARIANT 221: note = X can be any amino acid
  VARIANT 222: note = X can be any amino acid
  VARIANT 223: note = X can be any amino acid
  VARIANT 226: note = X can be any amino acid
  VARIANT 227: note = X can be any amino acid
  VARIANT 229: note = X can be any amino acid
  VARIANT 230: note = X can be any amino acid
  VARIANT 231: note = X can be any amino acid
  VARIANT 232: note = X can be any amino acid
  VARIANT 233: note = X can be any amino acid

SEQ ID NO: 19372 - protein, 227 aa, synthetic construct
  VARIANT 2: note = X can be any amino acid
  VARIANT 3: note = X can be any amino acid
  VARIANT 4: note = X can be any amino acid
  VARIANT 5: note = X can be any amino acid
  VARIANT 6: note = X can be any amino acid
  VARIANT 7: note = X can be any amino acid
  VARIANT 8: note = X can be any amino acid
  VARIANT 9: note = X can be any amino acid
  VARIANT 10: note = X can be any amino acid
  VARIANT 11: note = X can be any amino acid
  VARIANT 12: note = X can be any amino acid
  VARIANT 13: note = X can be any amino acid
  VARIANT 15: note = X can be any amino acid
  VARIANT 16: note = X can be any amino acid
  VARIANT 17: note = X can be any amino acid
  VARIANT 18: note = X can be any amino acid
  VARIANT 20: note = X can be any amino acid
  VARIANT 21: note = X can be any amino acid
  VARIANT 22: note = X can be any amino acid
  VARIANT 25: note = X can be any amino acid
  VARIANT 26: note = X can be any amino acid
  VARIANT 28: note = X can be any amino acid
  VARIANT 30: note = X can be any amino acid
  VARIANT 31: note = X can be any amino acid
  VARIANT 32: note = X can be any amino acid
  VARIANT 33: note = X can be any amino acid
  VARIANT 34: note = X can be any amino acid
  VARIANT 35: note = X can be any amino acid
  VARIANT 36: note = X can be any amino acid
  VARIANT 37: note = X can be any amino acid
  VARIANT 38: note = X can be any amino acid
  VARIANT 39: note = X can be any amino acid
  VARIANT 40: note = X can be any amino acid
  VARIANT 41: note = X can be any amino acid
  VARIANT 42: note = X can be any amino acid
  VARIANT 43: note = X can be any amino acid
  VARIANT 44: note = X can be any amino acid
  VARIANT 45: note = X can be any amino acid
  VARIANT 48: note = X can be any amino acid
  VARIANT 49: note = X can be any amino acid
  VARIANT 50: note = X can be any amino acid
  VARIANT 51: note = X can be any amino acid
  VARIANT 53: note = X can be any amino acid
  VARIANT 54: note = X can be any amino acid
  VARIANT 55: note = X can be any amino acid
  VARIANT 56: note = X can be any amino acid
  VARIANT 58: note = X can be any amino acid
  VARIANT 59: note = X can be any amino acid
  VARIANT 61: note = X can be any amino acid
  VARIANT 62: note = X can be any amino acid
  VARIANT 63: note = X can be any amino acid
  VARIANT 64: note = X can be any amino acid
  VARIANT 65: note = X can be any amino acid
  VARIANT 66: note = X can be any amino acid
  VARIANT 67: note = X can be any amino acid
  VARIANT 68: note = X can be any amino acid
  VARIANT 69: note = X can be any amino acid
  VARIANT 72: note = X can be any amino acid
  VARIANT 73: note = X can be any amino acid
  VARIANT 76: note = X can be any amino acid
  VARIANT 78: note = X can be any amino acid
  VARIANT 79: note = X can be any amino acid
  VARIANT 80: note = X can be any amino acid
  VARIANT 81: note = X can be any amino acid
  VARIANT 82: note = X can be any amino acid
  VARIANT 83: note = X can be any amino acid
  VARIANT 84: note = X can be any amino acid
  VARIANT 85: note = X can be any amino acid
  VARIANT 86: note = X can be any amino acid
  VARIANT 87: note = X can be any amino acid
  VARIANT 88: note = X can be any amino acid
  VARIANT 89: note = X can be any amino acid
  VARIANT 90: note = X can be any amino acid
  VARIANT 91: note = X can be any amino acid
  VARIANT 92: note = X can be any amino acid
  VARIANT 93: note = X can be any amino acid
  VARIANT 94: note = X can be any amino acid
  VARIANT 95: note = X can be any amino acid
  VARIANT 96: note = X can be any amino acid
  VARIANT 97: note = X can be any amino acid
  VARIANT 98: note = X can be any amino acid
  VARIANT 99: note = X can be any amino acid
  VARIANT 100: note = X can be any amino acid
  VARIANT 101: note = X can be any amino acid
  VARIANT 102: note = X can be any amino acid
  VARIANT 103: note = X can be any amino acid
  VARIANT 104: note = X can be any amino acid
  VARIANT 105: note = X can be any amino acid
  VARIANT 106: note = X can be any amino acid
  VARIANT 107: note = X can be any amino acid
  VARIANT 108: note = X can be any amino acid
  VARIANT 109: note = X can be any amino acid
  VARIANT 110: note = X can be any amino acid
  VARIANT 111: note = X can be any amino acid
  VARIANT 112: note = X can be any amino acid
  VARIANT 113: note = X can be any amino acid
  VARIANT 115: note = X can be any amino acid
  VARIANT 116: note = X can be any amino acid
  VARIANT 118: note = X can be any amino acid
  VARIANT 119: note = X can be any amino acid
  VARIANT 120: note = X can be any amino acid
  VARIANT 123: note = X can be any amino acid
  VARIANT 125: note = X can be any amino acid
  VARIANT 127: note = X can be any amino acid
  VARIANT 128: note = X can be any amino acid
  VARIANT 130: note = X can be any amino acid
  VARIANT 131: note = X can be any amino acid
  VARIANT 132: note = X can be any amino acid
  VARIANT 134: note = X can be any amino acid
  VARIANT 135: note = X can be any amino acid
  VARIANT 136: note = X can be any amino acid
  VARIANT 137: note = X can be any amino acid
  VARIANT 138: note = X can be any amino acid
  VARIANT 139: note = X can be any amino acid
  VARIANT 140: note = X can be any amino acid
  VARIANT 141: note = X can be any amino acid
  VARIANT 142: note = X can be any amino acid
  VARIANT 143: note = X can be any amino acid
  VARIANT 144: note = X can be any amino acid
  VARIANT 145: note = X can be any amino acid
  VARIANT 146: note = X can be any amino acid
  VARIANT 148: note = X can be any amino acid
  VARIANT 151: note = X can be any amino acid
  VARIANT 155: note = X can be any amino acid
  VARIANT 156: note = X can be any amino acid
  VARIANT 159: note = X can be any amino acid
  VARIANT 160: note = X can be any amino acid
  VARIANT 161: note = X can be any amino acid
  VARIANT 163: note = X can be any amino acid
  VARIANT 164: note = X can be any amino acid
  VARIANT 165: note = X can be any amino acid
  VARIANT 166: note = X can be any amino acid
  VARIANT 167: note = X can be any amino acid
  VARIANT 168: note = X can be any amino acid
  VARIANT 169: note = X can be any amino acid
  VARIANT 170: note = X can be any amino acid
  VARIANT 171: note = X can be any amino acid
  VARIANT 172: note = X can be any amino acid
  VARIANT 173: note = X can be any amino acid
  VARIANT 175: note = X can be any amino acid
  VARIANT 176: note = X can be any amino acid
  VARIANT 177: note = X can be any amino acid
  VARIANT 178: note = X can be any amino acid
  VARIANT 179: note = X can be any amino acid
  VARIANT 180: note = X can be any amino acid
  VARIANT 181: note = X can be any amino acid
  VARIANT 183: note = X can be any amino acid
  VARIANT 184: note = X can be any amino acid
  VARIANT 187: note = X can be any amino acid
  VARIANT 188: note = X can be any amino acid
  VARIANT 189: note = X can be any amino acid
  VARIANT 190: note = X can be any amino acid
  VARIANT 191: note = X can be any amino acid
  VARIANT 192: note = X can be any amino acid
  VARIANT 193: note = X can be any amino acid
  VARIANT 194: note = X can be any amino acid
  VARIANT 195: note = X can be any amino acid
  VARIANT 196: note = X can be any amino acid
  VARIANT 197: note = X can be any amino acid
  VARIANT 200: note = X can be any amino acid
  VARIANT 201: note = X can be any amino acid
  VARIANT 202: note = X can be any amino acid
  VARIANT 203: note = X can be any amino acid
  VARIANT 204: note = X can be any amino acid
  VARIANT 205: note = X can be any amino acid
  VARIANT 206: note = X can be any amino acid
  VARIANT 207: note = X can be any amino acid
  VARIANT 208: note = X can be any amino acid
  VARIANT 209: note = X can be any amino acid
  VARIANT 211: note = X can be any amino acid
  VARIANT 212: note = X can be any amino acid
  VARIANT 213: note = X can be any amino acid
  VARIANT 214: note = X can be any amino acid
  VARIANT 215: note = X can be any amino acid
  VARIANT 216: note = X can be any amino acid
  VARIANT 217: note = X can be any amino acid
  VARIANT 218: note = X can be any amino acid
  VARIANT 219: note = X can be any amino acid
  VARIANT 220: note = X can be any amino acid
  VARIANT 221: note = X can be any amino acid
  VARIANT 223: note = X can be any amino acid
  VARIANT 224: note = X can be any amino acid
  VARIANT 225: note = X can be any amino acid
  VARIANT 226: note = X can be any amino acid
  VARIANT 227: note = X can be any amino acid
YXXXXXXXXXXXXRXXXXPXXXLKXXQXWXXXXXXXXXXXXXXXXAYXXXXSXXXXAXXHXXXXXXXXXDIXXFFXSXXXXXXXXXXXXXXXXXXXXXXXXXXXXXXXXXXXXLXXGXXXSPXIXNXXMXXXDXXXXXXXXXXXXXYXRYXDDIXXSSXXXIXXXXXXXXXXXLXXXXXXXNXXKTXXXXXXXXXXXTGXXXXXXXXXXGXXXXXXXXXXXYXXXXX

SEQ ID NO: 19373 - protein, 222 aa, synthetic construct
  VARIANT 3: note = X can be any amino acid
  VARIANT 5: note = X can be any amino acid
  VARIANT 6: note = X can be any amino acid
  VARIANT 7: note = X can be any amino acid
  VARIANT 9: note = X can be any amino acid
  VARIANT 10: note = X can be any amino acid
  VARIANT 12: note = X can be any amino acid
  VARIANT 13: note = X can be any amino acid
  VARIANT 15: note = X can be any amino acid
  VARIANT 17: note = X can be any amino acid
  VARIANT 18: note = X can be any amino acid
  VARIANT 21: note = X can be any amino acid
  VARIANT 23: note = X can be any amino acid
  VARIANT 25: note = X can be any amino acid
  VARIANT 26: note = X can be any amino acid
  VARIANT 28: note = X can be any amino acid
  VARIANT 29: note = X can be any amino acid
  VARIANT 30: note = X can be any amino acid
  VARIANT 31: note = X can be any amino acid
  VARIANT 33: note = X can be any amino acid
  VARIANT 34: note = X can be any amino acid
  VARIANT 36: note = X can be any amino acid
  VARIANT 37: note = X can be any amino acid
  VARIANT 39: note = X can be any amino acid
  VARIANT 40: note = X can be any amino acid
  VARIANT 42: note = X can be any amino acid
  VARIANT 43: note = X can be any amino acid
  VARIANT 44: note = X can be any amino acid
  VARIANT 45: note = X can be any amino acid
  VARIANT 46: note = X can be any amino acid
  VARIANT 47: note = X can be any amino acid
  VARIANT 48: note = X can be any amino acid
  VARIANT 49: note = X can be any amino acid
  VARIANT 50: note = X can be any amino acid
  VARIANT 51: note = X can be any amino acid
  VARIANT 53: note = X can be any amino acid
  VARIANT 54: note = X can be any amino acid
  VARIANT 55: note = X can be any amino acid
  VARIANT 58: note = X can be any amino acid
  VARIANT 59: note = X can be any amino acid
  VARIANT 61: note = X can be any amino acid
  VARIANT 62: note = X can be any amino acid
  VARIANT 63: note = X can be any amino acid
  VARIANT 64: note = X can be any amino acid
  VARIANT 65: note = X can be any amino acid
  VARIANT 66: note = X can be any amino acid
  VARIANT 67: note = X can be any amino acid
  VARIANT 68: note = X can be any amino acid
  VARIANT 69: note = X can be any amino acid
  VARIANT 72: note = X can be any amino acid
  VARIANT 73: note = X can be any amino acid
  VARIANT 74: note = X can be any amino acid
  VARIANT 76: note = X can be any amino acid
  VARIANT 77: note = X can be any amino acid
  VARIANT 79: note = X can be any amino acid
  VARIANT 80: note = X can be any amino acid
  VARIANT 81: note = X can be any amino acid
  VARIANT 82: note = X can be any amino acid
  VARIANT 83: note = X can be any amino acid
  VARIANT 84: note = X can be any amino acid
  VARIANT 85: note = X can be any amino acid
  VARIANT 86: note = X can be any amino acid
  VARIANT 87: note = X can be any amino acid
  VARIANT 88: note = X can be any amino acid
  VARIANT 89: note = X can be any amino acid
  VARIANT 90: note = X can be any amino acid
  VARIANT 91: note = X can be any amino acid
  VARIANT 92: note = X can be any amino acid
  VARIANT 93: note = X can be any amino acid
  VARIANT 94: note = X can be any amino acid
  VARIANT 95: note = X can be any amino acid
  VARIANT 96: note = X can be any amino acid
  VARIANT 97: note = X can be any amino acid
  VARIANT 98: note = X can be any amino acid
  VARIANT 99: note = X can be any amino acid
  VARIANT 100: note = X can be any amino acid
  VARIANT 101: note = X can be any amino acid
  VARIANT 102: note = X can be any amino acid
  VARIANT 103: note = X can be any amino acid
  VARIANT 104: note = X can be any amino acid
  VARIANT 106: note = X can be any amino acid
  VARIANT 107: note = X can be any amino acid
  VARIANT 108: note = X can be any amino acid
  VARIANT 109: note = X can be any amino acid
  VARIANT 119: note = X can be any amino acid
  VARIANT 120: note = X can be any amino acid
  VARIANT 123: note = X can be any amino acid
  VARIANT 124: note = X can be any amino acid
  VARIANT 126: note = X can be any amino acid
  VARIANT 127: note = X can be any amino acid
  VARIANT 130: note = X can be any amino acid
  VARIANT 131: note = X can be any amino acid
  VARIANT 132: note = X can be any amino acid
  VARIANT 133: note = X can be any amino acid
  VARIANT 134: note = X can be any amino acid
  VARIANT 135: note = X can be any amino acid
  VARIANT 136: note = X can be any amino acid
  VARIANT 137: note = X can be any amino acid
  VARIANT 138: note = X can be any amino acid
  VARIANT 139: note = X can be any amino acid
  VARIANT 140: note = X can be any amino acid
  VARIANT 141: note = X can be any amino acid
  VARIANT 142: note = X can be any amino acid
  VARIANT 144: note = X can be any amino acid
  VARIANT 147: note = X can be any amino acid
  VARIANT 150: note = X can be any amino acid
  VARIANT 152: note = X can be any amino acid
  VARIANT 154: note = X can be any amino acid
  VARIANT 155: note = X can be any amino acid
  VARIANT 156: note = X can be any amino acid
  VARIANT 157: note = X can be any amino acid
  VARIANT 158: note = X can be any amino acid
  VARIANT 159: note = X can be any amino acid
  VARIANT 160: note = X can be any amino acid
  VARIANT 161: note = X can be any amino acid
  VARIANT 162: note = X can be any amino acid
  VARIANT 163: note = X can be any amino acid
  VARIANT 164: note = X can be any amino acid
  VARIANT 165: note = X can be any amino acid
  VARIANT 166: note = X can be any amino acid
  VARIANT 167: note = X can be any amino acid
  VARIANT 168: note = X can be any amino acid
  VARIANT 169: note = X can be any amino acid
  VARIANT 170: note = X can be any amino acid
  VARIANT 172: note = X can be any amino acid
  VARIANT 173: note = X can be any amino acid
  VARIANT 174: note = X can be any amino acid
  VARIANT 175: note = X can be any amino acid
  VARIANT 176: note = X can be any amino acid
  VARIANT 177: note = X can be any amino acid
  VARIANT 178: note = X can be any amino acid
  VARIANT 180: note = X can be any amino acid
  VARIANT 181: note = X can be any amino acid
  VARIANT 183: note = X can be any amino acid
  VARIANT 185: note = X can be any amino acid
  VARIANT 186: note = X can be any amino acid
  VARIANT 187: note = X can be any amino acid
  VARIANT 188: note = X can be any amino acid
  VARIANT 189: note = X can be any amino acid
  VARIANT 190: note = X can be any amino acid
  VARIANT 191: note = X can be any amino acid
  VARIANT 193: note = X can be any amino acid
  VARIANT 197: note = X can be any amino acid
  VARIANT 198: note = X can be any amino acid
  VARIANT 199: note = X can be any amino acid
  VARIANT 201: note = X can be any amino acid
  VARIANT 202: note = X can be any amino acid
  VARIANT 203: note = X can be any amino acid
  VARIANT 204: note = X can be any amino acid
  VARIANT 206: note = X can be any amino acid
  VARIANT 208: note = X can be any amino acid
  VARIANT 209: note = X can be any amino acid
  VARIANT 211: note = X can be any amino acid
  VARIANT 212: note = X can be any amino acid
  VARIANT 213: note = X can be any amino acid
  VARIANT 216: note = X can be any amino acid
  VARIANT 217: note = X can be any amino acid
  VARIANT 218: note = X can be any amino acid
  VARIANT 219: note = X can be any amino acid
  VARIANT 221: note = X can be any amino acid
  VARIANT 222: note = X can be any amino acid
YRXFXXXKXXGXXRXIXXPRXFXKXXQXXXXDXXLXXLXXHXXXXXXXXXXSXXXNAXXHXXXXXXXXXDIXXXFXXIXXXXXXXXXXXXXXXXXXXXXXXXXXTXXXXLPQGAPTSPXXSNXXLXXFDXXXXXXXXXXXXXYXRYXDDXTXSXXXXXXXXXXXXXXXXXLXXXXXXXNXXKXRXXXXXXXQXVTGXXXNXXXXPXRXXRXXXRAXXXXAXX

SEQ ID NO: 19374 - protein, 222 aa, synthetic construct
  VARIANT 2: note = X can be any amino acid
  VARIANT 3: note = X can be any amino acid
  VARIANT 4: note = X can be any amino acid
  VARIANT 5: note = X can be any amino acid
  VARIANT 6: note = X can be any amino acid
  VARIANT 7: note = X can be any amino acid
  VARIANT 9: note = X can be any amino acid
  VARIANT 10: note = X can be any amino acid
  VARIANT 11: note = X can be any amino acid
  VARIANT 12: note = X can be any amino acid
  VARIANT 13: note = X can be any amino acid
  VARIANT 15: note = X can be any amino acid
  VARIANT 17: note = X can be any amino acid
  VARIANT 18: note = X can be any amino acid
  VARIANT 20: note = X can be any amino acid
  VARIANT 21: note = X can be any amino acid
  VARIANT 22: note = X can be any amino acid
  VARIANT 25: note = X can be any amino acid
  VARIANT 26: note = X can be any amino acid
  VARIANT 28: note = X can be any amino acid
  VARIANT 32: note = X can be any amino acid
  VARIANT 33: note = X can be any amino acid
  VARIANT 36: note = X can be any amino acid
  VARIANT 37: note = X can be any amino acid
  VARIANT 38: note = X can be any amino acid
  VARIANT 39: note = X can be any amino acid
  VARIANT 40: note = X can be any amino acid
  VARIANT 42: note = X can be any amino acid
  VARIANT 43: note = X can be any amino acid
  VARIANT 44: note = X can be any amino acid
  VARIANT 45: note = X can be any amino acid
  VARIANT 46: note = X can be any amino acid
  VARIANT 48: note = X can be any amino acid
  VARIANT 49: note = X can be any amino acid
  VARIANT 50: note = X can be any amino acid
  VARIANT 51: note = X can be any amino acid
  VARIANT 52: note = X can be any amino acid
  VARIANT 53: note = X can be any amino acid
  VARIANT 54: note = X can be any amino acid
  VARIANT 55: note = X can be any amino acid
  VARIANT 58: note = X can be any amino acid
  VARIANT 59: note = X can be any amino acid
  VARIANT 61: note = X can be any amino acid
  VARIANT 62: note = X can be any amino acid
  VARIANT 63: note = X can be any amino acid
  VARIANT 64: note = X can be any amino acid
  VARIANT 65: note = X can be any amino acid
  VARIANT 66: note = X can be any amino acid
  VARIANT 68: note = X can be any amino acid
  VARIANT 69: note = X can be any amino acid
  VARIANT 71: note = X can be any amino acid
  VARIANT 72: note = X can be any amino acid
  VARIANT 73: note = X can be any amino acid
  VARIANT 76: note = X can be any amino acid
  VARIANT 77: note = X can be any amino acid
  VARIANT 78: note = X can be any amino acid
  VARIANT 79: note = X can be any amino acid
  VARIANT 80: note = X can be any amino acid
  VARIANT 81: note = X can be any amino acid
  VARIANT 82: note = X can be any amino acid
  VARIANT 84: note = X can be any amino acid
  VARIANT 85: note = X can be any amino acid
  VARIANT 86: note = X can be any amino acid
  VARIANT 88: note = X can be any amino acid
  VARIANT 89: note = X can be any amino acid
  VARIANT 90: note = X can be any amino acid
  VARIANT 93: note = X can be any amino acid
  VARIANT 94: note = X can be any amino acid
  VARIANT 95: note = X can be any amino acid
  VARIANT 96: note = X can be any amino acid
  VARIANT 97: note = X can be any amino acid
  VARIANT 98: note = X can be any amino acid
  VARIANT 99: note = X can be any amino acid
  VARIANT 101: note = X can be any amino acid
  VARIANT 102: note = X can be any amino acid
  VARIANT 103: note = X can be any amino acid
  VARIANT 105: note = X can be any amino acid
  VARIANT 106: note = X can be any amino acid
  VARIANT 107: note = X can be any amino acid
  VARIANT 108: note = X can be any amino acid
  VARIANT 109: note = X can be any amino acid
  VARIANT 114: note = X can be any amino acid
  VARIANT 115: note = X can be any amino acid
  VARIANT 116: note = X can be any amino acid
  VARIANT 119: note = X can be any amino acid
  VARIANT 120: note = X can be any amino acid
  VARIANT 121: note = X can be any amino acid
  VARIANT 124: note = X can be any amino acid
  VARIANT 125: note = X can be any amino acid
  VARIANT 126: note = X can be any amino acid
  VARIANT 127: note = X can be any amino acid
  VARIANT 130: note = X can be any amino acid
  VARIANT 132: note = X can be any amino acid
  VARIANT 133: note = X can be any amino acid
  VARIANT 134: note = X can be any amino acid
  VARIANT 135: note = X can be any amino acid
  VARIANT 136: note = X can be any amino acid
  VARIANT 137: note = X can be any amino acid
  VARIANT 138: note = X can be any amino acid
  VARIANT 139: note = X can be any amino acid
  VARIANT 140: note = X can be any amino acid
  VARIANT 141: note = X can be any amino acid
  VARIANT 142: note = X can be any amino acid
  VARIANT 150: note = X can be any amino acid
  VARIANT 151: note = X can be any amino acid
  VARIANT 152: note = X can be any amino acid
  VARIANT 154: note = X can be any amino acid
  VARIANT 155: note = X can be any amino acid
  VARIANT 156: note = X can be any amino acid
  VARIANT 157: note = X can be any amino acid
  VARIANT 158: note = X can be any amino acid
  VARIANT 159: note = X can be any amino acid
  VARIANT 160: note = X can be any amino acid
  VARIANT 161: note = X can be any amino acid
  VARIANT 162: note = X can be any amino acid
  VARIANT 163: note = X can be any amino acid
  VARIANT 164: note = X can be any amino acid
  VARIANT 165: note = X can be any amino acid
  VARIANT 166: note = X can be any amino acid
  VARIANT 167: note = X can be any amino acid
  VARIANT 168: note = X can be any amino acid
  VARIANT 169: note = X can be any amino acid
  VARIANT 171: note = X can be any amino acid
  VARIANT 172: note = X can be any amino acid
  VARIANT 173: note = X can be any amino acid
  VARIANT 175: note = X can be any amino acid
  VARIANT 176: note = X can be any amino acid
  VARIANT 177: note = X can be any amino acid
  VARIANT 178: note = X can be any amino acid
  VARIANT 180: note = X can be any amino acid
  VARIANT 181: note = X can be any amino acid
  VARIANT 183: note = X can be any amino acid
  VARIANT 184: note = X can be any amino acid
  VARIANT 185: note = X can be any amino acid
  VARIANT 186: note = X can be any amino acid
  VARIANT 187: note = X can be any amino acid
  VARIANT 188: note = X can be any amino acid
  VARIANT 189: note = X can be any amino acid
  VARIANT 190: note = X can be any amino acid
  VARIANT 191: note = X can be any amino acid
  VARIANT 192: note = X can be any amino acid
  VARIANT 193: note = X can be any amino acid
  VARIANT 194: note = X can be any amino acid
  VARIANT 197: note = X can be any amino acid
  VARIANT 198: note = X can be any amino acid
  VARIANT 199: note = X can be any amino acid
  VARIANT 200: note = X can be any amino acid
  VARIANT 201: note = X can be any amino acid
  VARIANT 202: note = X can be any amino acid
  VARIANT 203: note = X can be any amino acid
  VARIANT 204: note = X can be any amino acid
  VARIANT 205: note = X can be any amino acid
  VARIANT 206: note = X can be any amino acid
  VARIANT 207: note = X can be any amino acid
  VARIANT 208: note = X can be any amino acid
  VARIANT 209: note = X can be any amino acid
  VARIANT 210: note = X can be any amino acid
  VARIANT 211: note = X can be any amino acid
  VARIANT 212: note = X can be any amino acid
  VARIANT 213: note = X can be any amino acid
  VARIANT 215: note = X can be any amino acid
  VARIANT 216: note = X can be any amino acid
  VARIANT 217: note = X can be any amino acid
  VARIANT 218: note = X can be any amino acid
  VARIANT 219: note = X can be any amino acid
  VARIANT 220: note = X can be any amino acid
  VARIANT 221: note = X can be any amino acid
  VARIANT 222: note = X can be any amino acid
YXXXXXXKXXXXXRXIXXPXXXLKXXQXWILXXILXXXXXSXXXXXFXXXXXXXXNAXXHXXXXXXLXXDXXXFFXXXXXXXVXXXFXXXGYXXXXXXXLXXXCXXXXXLPQGXXXSPXXXNLXXXXLDXRXXXXXXXXXXXYTRYADDXXXSXXXXXXXXXXXXXXXXIXXXEXXXXNXXKXXXXXXXXXXXXTGXXXXXXXXXXXXXXXXXRXXXXXXXX

SEQ ID NO: 19375 - protein, 248 aa, synthetic construct
  VARIANT 1: note = X can be any amino acid
  VARIANT 2: note = X can be any amino acid
  VARIANT 3: note = X can be any amino acid
  VARIANT 4: note = X can be any amino acid
  VARIANT 5: note = X can be any amino acid
  VARIANT 7: note = X can be any amino acid
  VARIANT 8: note = X can be any amino acid
  VARIANT 9: note = X can be any amino acid
  VARIANT 10: note = X can be any amino acid
  VARIANT 11: note = X can be any amino acid
  VARIANT 12: note = X can be any amino acid
  VARIANT 16: note = X can be any amino acid
  VARIANT 18: note = X can be any amino acid
  VARIANT 19: note = X can be any amino acid
  VARIANT 20: note = X can be any amino acid
  VARIANT 21: note = X can be any amino acid
  VARIANT 22: note = X can be any amino acid
  VARIANT 23: note = X can be any amino acid
  VARIANT 24: note = X can be any amino acid
  VARIANT 25: note = X can be any amino acid
  VARIANT 26: note = X can be any amino acid
  VARIANT 27: note = X can be any amino acid
  VARIANT 28: note = X can be any amino acid
  VARIANT 30: note = X can be any amino acid
  VARIANT 31: note = X can be any amino acid
  VARIANT 32: note = X can be any amino acid
  VARIANT 33: note = X can be any amino acid
  VARIANT 34: note = X can be any amino acid
  VARIANT 35: note = X can be any amino acid
  VARIANT 36: note = X can be any amino acid
  VARIANT 37: note = X can be any amino acid
  VARIANT 38: note = X can be any amino acid
  VARIANT 39: note = X can be any amino acid
  VARIANT 40: note = X can be any amino acid
  VARIANT 41: note = X can be any amino acid
  VARIANT 42: note = X can be any amino acid
  VARIANT 43: note = X can be any amino acid
  VARIANT 44: note = X can be any amino acid
  VARIANT 46: note = X can be any amino acid
  VARIANT 50: note = X can be any amino acid
  VARIANT 51: note = X can be any amino acid
  VARIANT 52: note = X can be any amino acid
  VARIANT 53: note = X can be any amino acid
  VARIANT 56: note = X can be any amino acid
  VARIANT 57: note = X can be any amino acid
  VARIANT 60: note = X can be any amino acid
  VARIANT 61: note = X can be any amino acid
  VARIANT 67: note = X can be any amino acid
  VARIANT 69: note = X can be any amino acid
  VARIANT 70: note = X can be any amino acid
  VARIANT 71: note = X can be any amino acid
  VARIANT 74: note = X can be any amino acid
  VARIANT 75: note = X can be any amino acid
  VARIANT 78: note = X can be any amino acid
  VARIANT 79: note = X can be any amino acid
  VARIANT 81: note = X can be any amino acid
  VARIANT 83: note = X can be any amino acid
  VARIANT 84: note = X can be any amino acid
  VARIANT 86: note = X can be any amino acid
  VARIANT 87: note = X can be any amino acid
  VARIANT 88: note = X can be any amino acid
  VARIANT 90: note = X can be any amino acid
  VARIANT 91: note = X can be any amino acid
  VARIANT 92: note = X can be any amino acid
  VARIANT 93: note = X can be any amino acid
  VARIANT 94: note = X can be any amino acid
  VARIANT 95: note = X can be any amino acid
  VARIANT 96: note = X can be any amino acid
  VARIANT 97: note = X can be any amino acid
  VARIANT 98: note = X can be any amino acid
  VARIANT 99: note = X can be any amino acid
  VARIANT 100: note = X can be any amino acid
  VARIANT 101: note = X can be any amino acid
  VARIANT 102: note = X can be any amino acid
  VARIANT 103: note = X can be any amino acid
  VARIANT 104: note = X can be any amino acid
  VARIANT 105: note = X can be any amino acid
  VARIANT 106: note = X can be any amino acid
  VARIANT 107: note = X can be any amino acid
  VARIANT 108: note = X can be any amino acid
  VARIANT 109: note = X can be any amino acid
  VARIANT 110: note = X can be any amino acid
  VARIANT 111: note = X can be any amino acid
  VARIANT 112: note = X can be any amino acid
  VARIANT 113: note = X can be any amino acid
  VARIANT 114: note = X can be any amino acid
  VARIANT 115: note = X can be any amino acid
  VARIANT 116: note = X can be any amino acid
  VARIANT 117: note = X can be any amino acid
  VARIANT 118: note = X can be any amino acid
  VARIANT 121: note = X can be any amino acid
  VARIANT 122: note = X can be any amino acid
  VARIANT 124: note = X can be any amino acid
  VARIANT 125: note = X can be any amino acid
  VARIANT 126: note = X can be any amino acid
  VARIANT 129: note = X can be any amino acid
  VARIANT 131: note = X can be any amino acid
  VARIANT 133: note = X can be any amino acid
  VARIANT 135: note = X can be any amino acid
  VARIANT 137: note = X can be any amino acid
  VARIANT 140: note = X can be any amino acid
  VARIANT 142: note = X can be any amino acid
  VARIANT 145: note = X can be any amino acid
  VARIANT 148: note = X can be any amino acid
  VARIANT 149: note = X can be any amino acid
  VARIANT 150: note = X can be any amino acid
  VARIANT 151: note = X can be any amino acid
  VARIANT 152: note = X can be any amino acid
  VARIANT 153: note = X can be any amino acid
  VARIANT 154: note = X can be any amino acid
  VARIANT 163: note = X can be any amino acid
  VARIANT 164: note = X can be any amino acid
  VARIANT 169: note = X can be any amino acid
  VARIANT 170: note = X can be any amino acid
  VARIANT 171: note = X can be any amino acid
  VARIANT 172: note = X can be any amino acid
  VARIANT 173: note = X can be any amino acid
  VARIANT 174: note = X can be any amino acid
  VARIANT 175: note = X can be any amino acid
  VARIANT 176: note = X can be any amino acid
  VARIANT 177: note = X can be any amino acid
  VARIANT 178: note = X can be any amino acid
  VARIANT 179: note = X can be any amino acid
  VARIANT 181: note = X can be any amino acid
  VARIANT 182: note = X can be any amino acid
  VARIANT 183: note = X can be any amino acid
  VARIANT 184: note = X can be any amino acid
  VARIANT 185: note = X can be any amino acid
  VARIANT 186: note = X can be any amino acid
  VARIANT 187: note = X can be any amino acid
  VARIANT 189: note = X can be any amino acid
  VARIANT 190: note = X can be any amino acid
  VARIANT 191: note = X can be any amino acid
  VARIANT 192: note = X can be any amino acid
  VARIANT 194: note = X can be any amino acid
  VARIANT 195: note = X can be any amino acid
  VARIANT 197: note = X can be any amino acid
  VARIANT 198: note = X can be any amino acid
  VARIANT 200: note = X can be any amino acid
  VARIANT 201: note = X can be any amino acid
  VARIANT 202: note = X can be any amino acid
  VARIANT 203: note = X can be any amino acid
  VARIANT 204: note = X can be any amino acid
  VARIANT 205: note = X can be any amino acid
  VARIANT 206: note = X can be any amino acid
  VARIANT 207: note = X can be any amino acid
  VARIANT 212: note = X can be any amino acid
  VARIANT 216: note = X can be any amino acid
  VARIANT 217: note = X can be any amino acid
  VARIANT 219: note = X can be any amino acid
  VARIANT 220: note = X can be any amino acid
  VARIANT 221: note = X can be any amino acid
  VARIANT 222: note = X can be any amino acid
  VARIANT 223: note = X can be any amino acid
  VARIANT 224: note = X can be any amino acid
  VARIANT 225: note = X can be any amino acid
  VARIANT 227: note = X can be any amino acid
  VARIANT 228: note = X can be any amino acid
  VARIANT 229: note = X can be any amino acid
  VARIANT 232: note = X can be any amino acid
  VARIANT 233: note = X can be any amino acid
  VARIANT 234: note = X can be any amino acid
  VARIANT 235: note = X can be any amino acid
  VARIANT 236: note = X can be any amino acid
  VARIANT 237: note = X can be any amino acid
  VARIANT 239: note = X can be any amino acid
  VARIANT 240: note = X can be any amino acid
  VARIANT 241: note = X can be any amino acid
  VARIANT 243: note = X can be any amino acid
  VARIANT 244: note = X can be any amino acid
  VARIANT 245: note = X can be any amino acid
  VARIANT 246: note = X can be any amino acid
  VARIANT 247: note = X can be any amino acid
  VARIANT 248: note = X can be any amino acid
XXXXXIXXXXXXRKIXTXXXXXXXXXXXHXXXXXXXXXXXXXXXFXKAYXXXXSIXXNAXXHMYNDXFXXXDIXXFFXXIXHXXLXXXLXXXXXXXXXXXXXXXXXXXXXXXXXXXXXGLXXGXXXSPXLXNXYXKXFDXIXYGXLKXXXXXXXIYTRYADDXXISFKXXXXXXXXXXXIXXXXXXXLXXXXLXXNXXKXXXXXXXXSNHVXITGXXIXXXXXXXRXXXVGXXXXXXLXXXAXXXXXX

SEQ ID NO: 19376 - protein, 242 aa, synthetic construct
  VARIANT 1: note = X can be any amino acid
  VARIANT 2: note = X can be any amino acid
  VARIANT 3: note = X can be any amino acid
  VARIANT 4: note = X can be any amino acid
  VARIANT 5: note = X can be any amino acid
  VARIANT 6: note = X can be any amino acid
  VARIANT 7: note = X can be any amino acid
  VARIANT 8: note = X can be any amino acid
  VARIANT 9: note = X can be any amino acid
  VARIANT 10: note = X can be any amino acid
  VARIANT 12: note = X can be any amino acid
  VARIANT 14: note = X can be any amino acid
  VARIANT 15: note = X can be any amino acid
  VARIANT 16: note = X can be any amino acid
  VARIANT 17: note = X can be any amino acid
  VARIANT 18: note = X can be any amino acid
  VARIANT 19: note = X can be any amino acid
  VARIANT 20: note = X can be any amino acid
  VARIANT 21: note = X can be any amino acid
  VARIANT 22: note = X can be any amino acid
  VARIANT 23: note = X can be any amino acid
  VARIANT 25: note = X can be any amino acid
  VARIANT 26: note = X can be any amino acid
  VARIANT 27: note = X can be any amino acid
  VARIANT 28: note = X can be any amino acid
  VARIANT 29: note = X can be any amino acid
  VARIANT 30: note = X can be any amino acid
  VARIANT 32: note = X can be any amino acid
  VARIANT 33: note = X can be any amino acid
  VARIANT 34: note = X can be any amino acid
  VARIANT 35: note = X can be any amino acid
  VARIANT 36: note = X can be any amino acid
  VARIANT 37: note = X can be any amino acid
  VARIANT 38: note = X can be any amino acid
  VARIANT 39: note = X can be any amino acid
  VARIANT 40: note = X can be any amino acid
  VARIANT 41: note = X can be any amino acid
  VARIANT 42: note = X can be any amino acid
  VARIANT 43: note = X can be any amino acid
  VARIANT 44: note = X can be any amino acid
  VARIANT 45: note = X can be any amino acid
  VARIANT 46: note = X can be any amino acid
  VARIANT 47: note = X can be any amino acid
  VARIANT 52: note = X can be any amino acid
  VARIANT 53: note = X can be any amino acid
  VARIANT 54: note = X can be any amino acid
  VARIANT 55: note = X can be any amino acid
  VARIANT 58: note = X can be any amino acid
  VARIANT 59: note = X can be any amino acid
  VARIANT 61: note = X can be any amino acid
  VARIANT 62: note = X can be any amino acid
  VARIANT 63: note = X can be any amino acid
  VARIANT 65: note = X can be any amino acid
  VARIANT 66: note = X can be any amino acid
  VARIANT 67: note = X can be any amino acid
  VARIANT 68: note = X can be any amino acid
  VARIANT 69: note = X can be any amino acid
  VARIANT 71: note = X can be any amino acid
  VARIANT 73: note = X can be any amino acid
  VARIANT 76: note = X can be any amino acid
  VARIANT 77: note = X can be any amino acid
  VARIANT 83: note = X can be any amino acid
  VARIANT 84: note = X can be any amino acid
  VARIANT 85: note = X can be any amino acid
  VARIANT 86: note = X can be any amino acid
  VARIANT 88: note = X can be any amino acid
  VARIANT 89: note = X can be any amino acid
  VARIANT 90: note = X can be any amino acid
  VARIANT 91: note = X can be any amino acid
  VARIANT 92: note = X can be any amino acid
  VARIANT 93: note = X can be any amino acid
  VARIANT 94: note = X can be any amino acid
  VARIANT 95: note = X can be any amino acid
  VARIANT 96: note = X can be any amino acid
  VARIANT 97: note = X can be any amino acid
  VARIANT 98: note = X can be any amino acid
  VARIANT 99: note = X can be any amino acid
  VARIANT 100: note = X can be any amino acid
  VARIANT 101: note = X can be any amino acid
  VARIANT 102: note = X can be any amino acid
  VARIANT 103: note = X can be any amino acid
  VARIANT 104: note = X can be any amino acid
  VARIANT 105: note = X can be any amino acid
  VARIANT 106: note = X can be any amino acid
  VARIANT 107: note = X can be any amino acid
  VARIANT 108: note = X can be any amino acid
  VARIANT 109: note = X can be any amino acid
  VARIANT 110: note = X can be any amino acid
  VARIANT 111: note = X can be any amino acid
  VARIANT 112: note = X can be any amino acid
  VARIANT 113: note = X can be any amino acid
  VARIANT 114: note = X can be any amino acid
  VARIANT 115: note = X can be any amino acid
  VARIANT 116: note = X can be any amino acid
  VARIANT 117: note = X can be any amino acid
  VARIANT 118: note = X can be any amino acid
  VARIANT 120: note = X can be any amino acid
  VARIANT 123: note = X can be any amino acid
  VARIANT 124: note = X can be any amino acid
  VARIANT 127: note = X can be any amino acid
  VARIANT 128: note = X can be any amino acid
  VARIANT 131: note = X can be any amino acid
  VARIANT 133: note = X can be any amino acid
  VARIANT 134: note = X can be any amino acid
  VARIANT 135: note = X can be any amino acid
  VARIANT 136: note = X can be any amino acid
  VARIANT 137: note = X can be any amino acid
  VARIANT 138: note = X can be any amino acid
  VARIANT 139: note = X can be any amino acid
  VARIANT 140: note = X can be any amino acid
  VARIANT 141: note = X can be any amino acid
  VARIANT 142: note = X can be any amino acid
  VARIANT 143: note = X can be any amino acid
  VARIANT 144: note = X can be any amino acid
  VARIANT 145: note = X can be any amino acid
  VARIANT 146: note = X can be any amino acid
  VARIANT 147: note = X can be any amino acid
  VARIANT 148: note = X can be any amino acid
  VARIANT 149: note = X can be any amino acid
  VARIANT 150: note = X can be any amino acid
  VARIANT 159: note = X can be any amino acid
  VARIANT 162: note = X can be any amino acid
  VARIANT 163: note = X can be any amino acid
  VARIANT 164: note = X can be any amino acid
  VARIANT 165: note = X can be any amino acid
  VARIANT 166: note = X can be any amino acid
  VARIANT 167: note = X can be any amino acid
  VARIANT 168: note = X can be any amino acid
  VARIANT 169: note = X can be any amino acid
  VARIANT 170: note = X can be any amino acid
  VARIANT 171: note = X can be any amino acid
  VARIANT 172: note = X can be any amino acid
  VARIANT 173: note = X can be any amino acid
  VARIANT 175: note = X can be any amino acid
  VARIANT 176: note = X can be any amino acid
  VARIANT 177: note = X can be any amino acid
  VARIANT 178: note = X can be any amino acid
  VARIANT 179: note = X can be any amino acid
  VARIANT 180: note = X can be any amino acid
  VARIANT 181: note = X can be any amino acid
  VARIANT 183: note = X can be any amino acid
  VARIANT 184: note = X can be any amino acid
  VARIANT 185: note = X can be any amino acid
  VARIANT 186: note = X can be any amino acid
  VARIANT 188: note = X can be any amino acid
  VARIANT 189: note = X can be any amino acid
  VARIANT 191: note = X can be any amino acid
  VARIANT 192: note = X can be any amino acid
  VARIANT 194: note = X can be any amino acid
  VARIANT 195: note = X can be any amino acid
  VARIANT 196: note = X can be any amino acid
  VARIANT 197: note = X can be any amino acid
  VARIANT 198: note = X can be any amino acid
  VARIANT 199: note = X can be any amino acid
  VARIANT 200: note = X can be any amino acid
  VARIANT 201: note = X can be any amino acid
  VARIANT 202: note = X can be any amino acid
  VARIANT 203: note = X can be any amino acid
  VARIANT 204: note = X can be any amino acid
  VARIANT 205: note = X can be any amino acid
  VARIANT 206: note = X can be any amino acid
  VARIANT 207: note = X can be any amino acid
  VARIANT 208: note = X can be any amino acid
  VARIANT 209: note = X can be any amino acid
  VARIANT 211: note = X can be any amino acid
  VARIANT 214: note = X can be any amino acid
  VARIANT 215: note = X can be any amino acid
  VARIANT 216: note = X can be any amino acid
  VARIANT 217: note = X can be any amino acid
  VARIANT 218: note = X can be any amino acid
  VARIANT 219: note = X can be any amino acid
  VARIANT 220: note = X can be any amino acid
  VARIANT 221: note = X can be any amino acid
  VARIANT 222: note = X can be any amino acid
  VARIANT 223: note = X can be any amino acid
  VARIANT 226: note = X can be any amino acid
  VARIANT 227: note = X can be any amino acid
  VARIANT 228: note = X can be any amino acid
  VARIANT 229: note = X can be any amino acid
  VARIANT 230: note = X can be any amino acid
  VARIANT 231: note = X can be any amino acid
  VARIANT 232: note = X can be any amino acid
  VARIANT 233: note = X can be any amino acid
  VARIANT 234: note = X can be any amino acid
  VARIANT 235: note = X can be any amino acid
  VARIANT 236: note = X can be any amino acid
  VARIANT 237: note = X can be any amino acid
  VARIANT 238: note = X can be any amino acid
  VARIANT 239: note = X can be any amino acid
  VARIANT 240: note = X can be any amino acid
  VARIANT 241: note = X can be any amino acid
  VARIANT 242: note = X can be any amino acid
XXXXXXXXXXKXRXXXXXXXXXXGXXXXXXHXXXXXXXXXXXXXXXXSYAYXXXXSIXXCXXXHXXXXXFXKXDIXXFFNSIXXXXLXXXXXXXXXXXXXXXXXXXXXXXXXXXXXXXPXGLXXSPXXSDXYXXXXXXXXXXXXXXXXXXYTRYADDIXISXXXXXXXXXXXXIXXXXXXXLXXXXLXXNXXKXXXXXXXXXXXXXXXXGXNIXXXXXXXXXXVGXXXXXXXXXXXXXXXXX

SEQ ID NO: 19377 - protein, 222 aa, synthetic construct
  VARIANT 3: note = X can be any amino acid
  VARIANT 5: note = X can be any amino acid
  VARIANT 6: note = X can be any amino acid
  VARIANT 7: note = X can be any amino acid
  VARIANT 9: note = X can be any amino acid
  VARIANT 10: note = X can be any amino acid
  VARIANT 12: note = X can be any amino acid
  VARIANT 13: note = X can be any amino acid
  VARIANT 15: note = X can be any amino acid
  VARIANT 17: note = X can be any amino acid
  VARIANT 18: note = X can be any amino acid
  VARIANT 20: note = X can be any amino acid
  VARIANT 26: note = X can be any amino acid
  VARIANT 31: note = X can be any amino acid
  VARIANT 33: note = X can be any amino acid
  VARIANT 35: note = X can be any amino acid
  VARIANT 36: note = X can be any amino acid
  VARIANT 37: note = X can be any amino acid
  VARIANT 38: note = X can be any amino acid
  VARIANT 39: note = X can be any amino acid
  VARIANT 40: note = X can be any amino acid
  VARIANT 41: note = X can be any amino acid
  VARIANT 42: note = X can be any amino acid
  VARIANT 43: note = X can be any amino acid
  VARIANT 44: note = X can be any amino acid
  VARIANT 45: note = X can be any amino acid
  VARIANT 48: note = X can be any amino acid
  VARIANT 49: note = X can be any amino acid
  VARIANT 51: note = X can be any amino acid
  VARIANT 52: note = X can be any amino acid
  VARIANT 53: note = X can be any amino acid
  VARIANT 54: note = X can be any amino acid
  VARIANT 55: note = X can be any amino acid
  VARIANT 58: note = X can be any amino acid
  VARIANT 59: note = X can be any amino acid
  VARIANT 61: note = X can be any amino acid
  VARIANT 62: note = X can be any amino acid
  VARIANT 63: note = X can be any amino acid
  VARIANT 64: note = X can be any amino acid
  VARIANT 65: note = X can be any amino acid
  VARIANT 66: note = X can be any amino acid
  VARIANT 69: note = X can be any amino acid
  VARIANT 71: note = X can be any amino acid
  VARIANT 72: note = X can be any amino acid
  VARIANT 73: note = X can be any amino acid
  VARIANT 76: note = X can be any amino acid
  VARIANT 78: note = X can be any amino acid
  VARIANT 79: note = X can be any amino acid
  VARIANT 80: note = X can be any amino acid
  VARIANT 81: note = X can be any amino acid
  VARIANT 82: note = X can be any amino acid
  VARIANT 83: note = X can be any amino acid
  VARIANT 84: note = X can be any amino acid
  VARIANT 85: note = X can be any amino acid
  VARIANT 86: note = X can be any amino acid
  VARIANT 88: note = X can be any amino acid
  VARIANT 89: note = X can be any amino acid
  VARIANT 90: note = X can be any amino acid
  VARIANT 92: note = X can be any amino acid
  VARIANT 93: note = X can be any amino acid
  VARIANT 94: note = X can be any amino acid
  VARIANT 95: note = X can be any amino acid
  VARIANT 96: note = X can be any amino acid
  VARIANT 97: note = X can be any amino acid
  VARIANT 98: note = X can be any amino acid
  VARIANT 99: note = X can be any amino acid
  VARIANT 101: note = X can be any amino acid
  VARIANT 102: note = X can be any amino acid
  VARIANT 104: note = X can be any amino acid
  VARIANT 105: note = X can be any amino acid
  VARIANT 106: note = X can be any amino acid
  VARIANT 107: note = X can be any amino acid
  VARIANT 108: note = X can be any amino acid
  VARIANT 109: note = X can be any amino acid
  VARIANT 110: note = X can be any amino acid
  VARIANT 112: note = X can be any amino acid
  VARIANT 119: note = X can be any amino acid
  VARIANT 120: note = X can be any amino acid
  VARIANT 121: note = X can be any amino acid
  VARIANT 123: note = X can be any amino acid
  VARIANT 124: note = X can be any amino acid
  VARIANT 125: note = X can be any amino acid
  VARIANT 126: note = X can be any amino acid
  VARIANT 127: note = X can be any amino acid
  VARIANT 128: note = X can be any amino acid
  VARIANT 130: note = X can be any amino acid
  VARIANT 131: note = X can be any amino acid
  VARIANT 133: note = X can be any amino acid
  VARIANT 134: note = X can be any amino acid
  VARIANT 135: note = X can be any amino acid
  VARIANT 136: note = X can be any amino acid
  VARIANT 137: note = X can be any amino acid
  VARIANT 138: note = X can be any amino acid
  VARIANT 139: note = X can be any amino acid
  VARIANT 140: note = X can be any amino acid
  VARIANT 141: note = X can be any amino acid
  VARIANT 142: note = X can be any amino acid
  VARIANT 144: note = X can be any amino acid
  VARIANT 150: note = X can be any amino acid
  VARIANT 154: note = X can be any amino acid
  VARIANT 155: note = X can be any amino acid
  VARIANT 156: note = X can be any amino acid
  VARIANT 157: note = X can be any amino acid
  VARIANT 158: note = X can be any amino acid
  VARIANT 159: note = X can be any amino acid
  VARIANT 160: note = X can be any amino acid
  VARIANT 161: note = X can be any amino acid
  VARIANT 162: note = X can be any amino acid
  VARIANT 163: note = X can be any amino acid
  VARIANT 164: note = X can be any amino acid
  VARIANT 165: note = X can be any amino acid
  VARIANT 166: note = X can be any amino acid
  VARIANT 167: note = X can be any amino acid
  VARIANT 168: note = X can be any amino acid
  VARIANT 169: note = X can be any amino acid
  VARIANT 170: note = X can be any amino acid
  VARIANT 171: note = X can be any amino acid
  VARIANT 172: note = X can be any amino acid
  VARIANT 173: note = X can be any amino acid
  VARIANT 176: note = X can be any amino acid
  VARIANT 177: note = X can be any amino acid
  VARIANT 178: note = X can be any amino acid
  VARIANT 179: note = X can be any amino acid
  VARIANT 180: note = X can be any amino acid
  VARIANT 183: note = X can be any amino acid
  VARIANT 184: note = X can be any amino acid
  VARIANT 185: note = X can be any amino acid
  VARIANT 187: note = X can be any amino acid
  VARIANT 188: note = X can be any amino acid
  VARIANT 189: note = X can be any amino acid
  VARIANT 191: note = X can be any amino acid
  VARIANT 192: note = X can be any amino acid
  VARIANT 196: note = X can be any amino acid
  VARIANT 197: note = X can be any amino acid
  VARIANT 198: note = X can be any amino acid
  VARIANT 200: note = X can be any amino acid
  VARIANT 201: note = X can be any amino acid
  VARIANT 202: note = X can be any amino acid
  VARIANT 203: note = X can be any amino acid
  VARIANT 204: note = X can be any amino acid
  VARIANT 205: note = X can be any amino acid
  VARIANT 206: note = X can be any amino acid
  VARIANT 207: note = X can be any amino acid
  VARIANT 208: note = X can be any amino acid
  VARIANT 210: note = X can be any amino acid
  VARIANT 211: note = X can be any amino acid
  VARIANT 212: note = X can be any amino acid
  VARIANT 214: note = X can be any amino acid
  VARIANT 215: note = X can be any amino acid
  VARIANT 216: note = X can be any amino acid
  VARIANT 218: note = X can be any amino acid
  VARIANT 219: note = X can be any amino acid
  VARIANT 220: note = X can be any amino acid
  VARIANT 221: note = X can be any amino acid
  VARIANT 222: note = X can be any amino acid
YRXFXXXKXXGXXRXIXXPXTYLKVXQWWIXDXIXXXXXXXXXXXGFXXGXXXXXNAXXHXXXXXXLNXDXXXFFXSXXXXXXXXXFXXXGXXXXXXXXLXXLXXXXXXXPXGAPTSPXXXNXXXXXXDXXLXXXXXXXXXXYXRYADDXTFSXXXXXXXXXXXXXXXXXXXXGFXXXXXKTXXXGXXXRXXVTGXXXNXXXXXXXXXRXXXRXXXHXXXXX

SEQ ID NO: 19378 - protein, 220 aa, synthetic construct
  VARIANT 3: note = X can be any amino acid
  VARIANT 4: note = X can be any amino acid
  VARIANT 5: note = X can be any amino acid
  VARIANT 7: note = X can be any amino acid
  VARIANT 9: note = X can be any amino acid
  VARIANT 10: note = X can be any amino acid
  VARIANT 12: note = X can be any amino acid
  VARIANT 13: note = X can be any amino acid
  VARIANT 15: note = X can be any amino acid
  VARIANT 17: note = X can be any amino acid
  VARIANT 22: note = X can be any amino acid
  VARIANT 25: note = X can be any amino acid
  VARIANT 28: note = X can be any amino acid
  VARIANT 32: note = X can be any amino acid
  VARIANT 33: note = X can be any amino acid
  VARIANT 36: note = X can be any amino acid
  VARIANT 37: note = X can be any amino acid
  VARIANT 38: note = X can be any amino acid
  VARIANT 39: note = X can be any amino acid
  VARIANT 40: note = X can be any amino acid
  VARIANT 42: note = X can be any amino acid
  VARIANT 43: note = X can be any amino acid
  VARIANT 47: note = X can be any amino acid
  VARIANT 48: note = X can be any amino acid
  VARIANT 49: note = X can be any amino acid
  VARIANT 50: note = X can be any amino acid
  VARIANT 51: note = X can be any amino acid
  VARIANT 52: note = X can be any amino acid
  VARIANT 53: note = X can be any amino acid
  VARIANT 54: note = X can be any amino acid
  VARIANT 55: note = X can be any amino acid
  VARIANT 57: note = X can be any amino acid
  VARIANT 58: note = X can be any amino acid
  VARIANT 59: note = X can be any amino acid
  VARIANT 61: note = X can be any amino acid
  VARIANT 62: note = X can be any amino acid
  VARIANT 63: note = X can be any amino acid
  VARIANT 64: note = X can be any amino acid
  VARIANT 65: note = X can be any amino acid
  VARIANT 66: note = X can be any amino acid
  VARIANT 67: note = X can be any amino acid
  VARIANT 68: note = X can be any amino acid
  VARIANT 69: note = X can be any amino acid
  VARIANT 71: note = X can be any amino acid
  VARIANT 72: note = X can be any amino acid
  VARIANT 73: note = X can be any amino acid
  VARIANT 76: note = X can be any amino acid
  VARIANT 77: note = X can be any amino acid
  VARIANT 79: note = X can be any amino acid
  VARIANT 80: note = X can be any amino acid
  VARIANT 81: note = X can be any amino acid
  VARIANT 82: note = X can be any amino acid
  VARIANT 83: note = X can be any amino acid
  VARIANT 84: note = X can be any amino acid
  VARIANT 85: note = X can be any amino acid
  VARIANT 86: note = X can be any amino acid
  VARIANT 88: note = X can be any amino acid
  VARIANT 89: note = X can be any amino acid
  VARIANT 90: note = X can be any amino acid
  VARIANT 93: note = X can be any amino acid
  VARIANT 94: note = X can be any amino acid
  VARIANT 95: note = X can be any amino acid
  VARIANT 96: note = X can be any amino acid
  VARIANT 97: note = X can be any amino acid
  VARIANT 98: note = X can be any amino acid
  VARIANT 99: note = X can be any amino acid
  VARIANT 101: note = X can be any amino acid
  VARIANT 102: note = X can be any amino acid
  VARIANT 105: note = X can be any amino acid
  VARIANT 106: note = X can be any amino acid
  VARIANT 107: note = X can be any amino acid
  VARIANT 108: note = X can be any amino acid
  VARIANT 109: note = X can be any amino acid
  VARIANT 119: note = X can be any amino acid
  VARIANT 123: note = X can be any amino acid
  VARIANT 124: note = X can be any amino acid
  VARIANT 125: note = X can be any amino acid
  VARIANT 126: note = X can be any amino acid
  VARIANT 127: note = X can be any amino acid
  VARIANT 128: note = X can be any amino acid
  VARIANT 130: note = X can be any amino acid
  VARIANT 131: note = X can be any amino acid
  VARIANT 132: note = X can be any amino acid
  VARIANT 133: note = X can be any amino acid
  VARIANT 134: note = X can be any amino acid
  VARIANT 135: note = X can be any amino acid
  VARIANT 136: note = X can be any amino acid
  VARIANT 137: note = X can be any amino acid
  VARIANT 138: note = X can be any amino acid
  VARIANT 139: note = X can be any amino acid
  VARIANT 140: note = X can be any amino acid
  VARIANT 141: note = X can be any amino acid
  VARIANT 142: note = X can be any amino acid
  VARIANT 150: note = X can be any amino acid
  VARIANT 151: note = X can be any amino acid
  VARIANT 155: note = X can be any amino acid
  VARIANT 156: note = X can be any amino acid
  VARIANT 157: note = X can be any amino acid
  VARIANT 158: note = X can be any amino acid
  VARIANT 159: note = X can be any amino acid
  VARIANT 160: note = X can be any amino acid
  VARIANT 161: note = X can be any amino acid
  VARIANT 162: note = X can be any amino acid
  VARIANT 163: note = X can be any amino acid
  VARIANT 164: note = X can be any amino acid
  VARIANT 165: note = X can be any amino acid
  VARIANT 166: note = X can be any amino acid
  VARIANT 167: note = X can be any amino acid
  VARIANT 168: note = X can be any amino acid
  VARIANT 169: note = X can be any amino acid
  VARIANT 170: note = X can be any amino acid
  VARIANT 171: note = X can be any amino acid
  VARIANT 172: note = X can be any amino acid
  VARIANT 173: note = X can be any amino acid
  VARIANT 174: note = X can be any amino acid
  VARIANT 175: note = X can be any amino acid
  VARIANT 176: note = X can be any amino acid
  VARIANT 178: note = X can be any amino acid
  VARIANT 179: note = X can be any amino acid
  VARIANT 181: note = X can be any amino acid
  VARIANT 182: note = X can be any amino acid
  VARIANT 183: note = X can be any amino acid
  VARIANT 184: note = X can be any amino acid
  VARIANT 185: note = X can be any amino acid
  VARIANT 186: note = X can be any amino acid
  VARIANT 187: note = X can be any amino acid
  VARIANT 188: note = X can be any amino acid
  VARIANT 189: note = X can be any amino acid
  VARIANT 191: note = X can be any amino acid
  VARIANT 195: note = X can be any amino acid
  VARIANT 199: note = X can be any amino acid
  VARIANT 201: note = X can be any amino acid
  VARIANT 203: note = X can be any amino acid
  VARIANT 204: note = X can be any amino acid
  VARIANT 205: note = X can be any amino acid
  VARIANT 206: note = X can be any amino acid
  VARIANT 207: note = X can be any amino acid
  VARIANT 209: note = X can be any amino acid
  VARIANT 210: note = X can be any amino acid
  VARIANT 211: note = X can be any amino acid
  VARIANT 213: note = X can be any amino acid
  VARIANT 214: note = X can be any amino acid
  VARIANT 215: note = X can be any amino acid
  VARIANT 216: note = X can be any amino acid
  VARIANT 217: note = X can be any amino acid
  VARIANT 219: note = X can be any amino acid
YRXXXIXKXXGXXRXIXEPLPXLKXIQXWILXXILXXXXXSXXAKAXXXXXXXXXNXXXHXXXXXXXXXDXXXFFXXIXXXXXXXXFXXXGYXXXXXXXLXXLCXXXXXLPQGAPTSPXLSNXXXXXXDXXXXXXXXXXXXXYTRYADDXXFSGXXXXXXXXXXXXXXXXXXXXXXNXXKXXXXXXXXXQXVTGXVVNXKXQXXXXXRXXXRXXXXXIXK

SEQ ID NO: 19379 - protein, 222 aa, synthetic construct
  VARIANT 3: note = X can be any amino acid
  VARIANT 5: note = X can be any amino acid
  VARIANT 7: note = X can be any amino acid
  VARIANT 9: note = X can be any amino acid
  VARIANT 10: note = X can be any amino acid
  VARIANT 13: note = X can be any amino acid
  VARIANT 15: note = X can be any amino acid
  VARIANT 17: note = X can be any amino acid
  VARIANT 18: note = X can be any amino acid
  VARIANT 20: note = X can be any amino acid
  VARIANT 21: note = X can be any amino acid
  VARIANT 22: note = X can be any amino acid
  VARIANT 24: note = X can be any amino acid
  VARIANT 25: note = X can be any amino acid
  VARIANT 26: note = X can be any amino acid
  VARIANT 28: note = X can be any amino acid
  VARIANT 29: note = X can be any amino acid
  VARIANT 31: note = X can be any amino acid
  VARIANT 32: note = X can be any amino acid
  VARIANT 33: note = X can be any amino acid
  VARIANT 36: note = X can be any amino acid
  VARIANT 37: note = X can be any amino acid
  VARIANT 38: note = X can be any amino acid
  VARIANT 39: note = X can be any amino acid
  VARIANT 40: note = X can be any amino acid
  VARIANT 41: note = X can be any amino acid
  VARIANT 42: note = X can be any amino acid
  VARIANT 43: note = X can be any amino acid
  VARIANT 44: note = X can be any amino acid
  VARIANT 45: note = X can be any amino acid
  VARIANT 46: note = X can be any amino acid
  VARIANT 47: note = X can be any amino acid
  VARIANT 48: note = X can be any amino acid
  VARIANT 49: note = X can be any amino acid
  VARIANT 50: note = X can be any amino acid
  VARIANT 51: note = X can be any amino acid
  VARIANT 53: note = X can be any amino acid
  VARIANT 54: note = X can be any amino acid
  VARIANT 55: note = X can be any amino acid
  VARIANT 58: note = X can be any amino acid
  VARIANT 59: note = X can be any amino acid
  VARIANT 61: note = X can be any amino acid
  VARIANT 62: note = X can be any amino acid
  VARIANT 63: note = X can be any amino acid
  VARIANT 64: note = X can be any amino acid
  VARIANT 65: note = X can be any amino acid
  VARIANT 66: note = X can be any amino acid
  VARIANT 69: note = X can be any amino acid
  VARIANT 71: note = X can be any amino acid
  VARIANT 72: note = X can be any amino acid
  VARIANT 73: note = X can be any amino acid
  VARIANT 76: note = X can be any amino acid
  VARIANT 79: note = X can be any amino acid
  VARIANT 80: note = X can be any amino acid
  VARIANT 81: note = X can be any amino acid
  VARIANT 82: note = X can be any amino acid
  VARIANT 83: note = X can be any amino acid
  VARIANT 84: note = X can be any amino acid
  VARIANT 85: note = X can be any amino acid
  VARIANT 86: note = X can be any amino acid
  VARIANT 88: note = X can be any amino acid
  VARIANT 89: note = X can be any amino acid
  VARIANT 90: note = X can be any amino acid
  VARIANT 93: note = X can be any amino acid
  VARIANT 94: note = X can be any amino acid
  VARIANT 95: note = X can be any amino acid
  VARIANT 96: note = X can be any amino acid
  VARIANT 97: note = X can be any amino acid
  VARIANT 98: note = X can be any amino acid
  VARIANT 99: note = X can be any amino acid
  VARIANT 101: note = X can be any amino acid
  VARIANT 102: note = X can be any amino acid
  VARIANT 103: note = X can be any amino acid
  VARIANT 105: note = X can be any amino acid
  VARIANT 106: note = X can be any amino acid
  VARIANT 107: note = X can be any amino acid
  VARIANT 108: note = X can be any amino acid
  VARIANT 109: note = X can be any amino acid
  VARIANT 115: note = X can be any amino acid
  VARIANT 119: note = X can be any amino acid
  VARIANT 123: note = X can be any amino acid
  VARIANT 124: note = X can be any amino acid
  VARIANT 125: note = X can be any amino acid
  VARIANT 126: note = X can be any amino acid
  VARIANT 127: note = X can be any amino acid
  VARIANT 128: note = X can be any amino acid
  VARIANT 130: note = X can be any amino acid
  VARIANT 131: note = X can be any amino acid
  VARIANT 133: note = X can be any amino acid
  VARIANT 134: note = X can be any amino acid
  VARIANT 135: note = X can be any amino acid
  VARIANT 136: note = X can be any amino acid
  VARIANT 137: note = X can be any amino acid
  VARIANT 138: note = X can be any amino acid
  VARIANT 139: note = X can be any amino acid
  VARIANT 140: note = X can be any amino acid
  VARIANT 141: note = X can be any amino acid
  VARIANT 142: note = X can be any amino acid
  VARIANT 144: note = X can be any amino acid
  VARIANT 150: note = X can be any amino acid
  VARIANT 151: note = X can be any amino acid
  VARIANT 152: note = X can be any amino acid
  VARIANT 155: note = X can be any amino acid
  VARIANT 156: note = X can be any amino acid
  VARIANT 157: note = X can be any amino acid
  VARIANT 158: note = X can be any amino acid
  VARIANT 159: note = X can be any amino acid
  VARIANT 160: note = X can be any amino acid
  VARIANT 161: note = X can be any amino acid
  VARIANT 162: note = X can be any amino acid
  VARIANT 163: note = X can be any amino acid
  VARIANT 164: note = X can be any amino acid
  VARIANT 165: note = X can be any amino acid
  VARIANT 166: note = X can be any amino acid
  VARIANT 167: note = X can be any amino acid
  VARIANT 168: note = X can be any amino acid
  VARIANT 169: note = X can be any amino acid
  VARIANT 170: note = X can be any amino acid
  VARIANT 171: note = X can be any amino acid
  VARIANT 172: note = X can be any amino acid
  VARIANT 174: note = X can be any amino acid
  VARIANT 175: note = X can be any amino acid
  VARIANT 176: note = X can be any amino acid
  VARIANT 178: note = X can be any amino acid
  VARIANT 179: note = X can be any amino acid
  VARIANT 181: note = X can be any amino acid
  VARIANT 182: note = X can be any amino acid
  VARIANT 183: note = X can be any amino acid
  VARIANT 184: note = X can be any amino acid
  VARIANT 185: note = X can be any amino acid
  VARIANT 186: note = X can be any amino acid
  VARIANT 187: note = X can be any amino acid
  VARIANT 188: note = X can be any amino acid
  VARIANT 189: note = X can be any amino acid
  VARIANT 190: note = X can be any amino acid
  VARIANT 192: note = X can be any amino acid
  VARIANT 195: note = X can be any amino acid
  VARIANT 196: note = X can be any amino acid
  VARIANT 197: note = X can be any amino acid
  VARIANT 198: note = X can be any amino acid
  VARIANT 199: note = X can be any amino acid
  VARIANT 200: note = X can be any amino acid
  VARIANT 201: note = X can be any amino acid
  VARIANT 202: note = X can be any amino acid
  VARIANT 203: note = X can be any amino acid
  VARIANT 204: note = X can be any amino acid
  VARIANT 206: note = X can be any amino acid
  VARIANT 207: note = X can be any amino acid
  VARIANT 208: note = X can be any amino acid
  VARIANT 209: note = X can be any amino acid
  VARIANT 211: note = X can be any amino acid
  VARIANT 212: note = X can be any amino acid
  VARIANT 213: note = X can be any amino acid
  VARIANT 214: note = X can be any amino acid
  VARIANT 215: note = X can be any amino acid
  VARIANT 216: note = X can be any amino acid
  VARIANT 217: note = X can be any amino acid
  VARIANT 218: note = X can be any amino acid
  VARIANT 219: note = X can be any amino acid
  VARIANT 220: note = X can be any amino acid
  VARIANT 221: note = X can be any amino acid
  VARIANT 222: note = X can be any amino acid
YRXFXIXKXXGGXRXIXXPXXXLXXXQXXIXXXILXXXXXXXXXXXXXXXXSXXXNAXXHXXXXXXLKXDXXXFFXSIXXXXXXXXFXXXGYXXXXXXXLXXXCXXXXXLPQGAXTSPXLSNXXXXXXDXXLXXXXXXXXXXYXRYADDXXXSGXXXXXXXXXXXXXXXXXXGXXXNXXKXXXXXXXXXXIXTGXXXXXXXXXXPXXXXRXXXXXXXXXXXX

SEQ ID NO: 19380 - protein, 252 aa, synthetic construct
  VARIANT 2: note = X can be any amino acid
  VARIANT 3: note = X can be any amino acid
  VARIANT 4: note = X can be any amino acid
  VARIANT 5: note = X can be any amino acid
  VARIANT 6: note = X can be any amino acid
  VARIANT 7: note = X can be any amino acid
  VARIANT 9: note = X can be any amino acid
  VARIANT 10: note = X can be any amino acid
  VARIANT 11: note = X can be any amino acid
  VARIANT 12: note = X can be any amino acid
  VARIANT 13: note = X can be any amino acid
  VARIANT 15: note = X can be any amino acid
  VARIANT 17: note = X can be any amino acid
  VARIANT 18: note = X can be any amino acid
  VARIANT 20: note = X can be any amino acid
  VARIANT 21: note = X can be any amino acid
  VARIANT 22: note = X can be any amino acid
  VARIANT 24: note = X can be any amino acid
  VARIANT 25: note = X can be any amino acid
  VARIANT 26: note = X can be any amino acid
  VARIANT 28: note = X can be any amino acid
  VARIANT 29: note = X can be any amino acid
  VARIANT 31: note = X can be any amino acid
  VARIANT 32: note = X can be any amino acid
  VARIANT 33: note = X can be any amino acid
  VARIANT 34: note = X can be any amino acid
  VARIANT 36: note = X can be any amino acid
  VARIANT 37: note = X can be any amino acid
  VARIANT 38: note = X can be any amino acid
  VARIANT 39: note = X can be any amino acid
  VARIANT 40: note = X can be any amino acid
  VARIANT 42: note = X can be any amino acid
  VARIANT 43: note = X can be any amino acid
  VARIANT 44: note = X can be any amino acid
  VARIANT 45: note = X can be any amino acid
  VARIANT 47: note = X can be any amino acid
  VARIANT 48: note = X can be any amino acid
  VARIANT 49: note = X can be any amino acid
  VARIANT 50: note = X can be any amino acid
  VARIANT 51: note = X can be any amino acid
  VARIANT 52: note = X can be any amino acid
  VARIANT 53: note = X can be any amino acid
  VARIANT 54: note = X can be any amino acid
  VARIANT 55: note = X can be any amino acid
  VARIANT 56: note = X can be any amino acid
  VARIANT 58: note = X can be any amino acid
  VARIANT 59: note = X can be any amino acid
  VARIANT 61: note = X can be any amino acid
  VARIANT 62: note = X can be any amino acid
  VARIANT 63: note = X can be any amino acid
  VARIANT 64: note = X can be any amino acid
  VARIANT 66: note = X can be any amino acid
  VARIANT 67: note = X can be any amino acid
  VARIANT 69: note = X can be any amino acid
  VARIANT 71: note = X can be any amino acid
  VARIANT 72: note = X can be any amino acid
  VARIANT 73: note = X can be any amino acid
  VARIANT 76: note = X can be any amino acid
  VARIANT 77: note = X can be any amino acid
  VARIANT 78: note = X can be any amino acid
  VARIANT 79: note = X can be any amino acid
  VARIANT 81: note = X can be any amino acid
  VARIANT 82: note = X can be any amino acid
  VARIANT 83: note = X can be any amino acid
  VARIANT 84: note = X can be any amino acid
  VARIANT 85: note = X can be any amino acid
  VARIANT 86: note = X can be any amino acid
  VARIANT 88: note = X can be any amino acid
  VARIANT 89: note = X can be any amino acid
  VARIANT 90: note = X can be any amino acid
  VARIANT 93: note = X can be any amino acid
  VARIANT 94: note = X can be any amino acid
  VARIANT 96: note = X can be any amino acid
  VARIANT 97: note = X can be any amino acid
  VARIANT 98: note = X can be any amino acid
  VARIANT 100: note = X can be any amino acid
  VARIANT 103: note = X can be any amino acid
  VARIANT 106: note = X can be any amino acid
  VARIANT 107: note = X can be any amino acid
  VARIANT 108: note = X can be any amino acid
  VARIANT 109: note = X can be any amino acid
  VARIANT 110: note = X can be any amino acid
  VARIANT 111: note = X can be any amino acid
  VARIANT 112: note = X can be any amino acid
  VARIANT 113: note = X can be any amino acid
  VARIANT 114: note = X can be any amino acid
  VARIANT 115: note = X can be any amino acid
  VARIANT 116: note = X can be any amino acid
  VARIANT 117: note = X can be any amino acid
  VARIANT 118: note = X can be any amino acid
  VARIANT 119: note = X can be any amino acid
  VARIANT 120: note = X can be any amino acid
  VARIANT 121: note = X can be any amino acid
  VARIANT 122: note = X can be any amino acid
  VARIANT 123: note = X can be any amino acid
  VARIANT 124: note = X can be any amino acid
  VARIANT 125: note = X can be any amino acid
  VARIANT 126: note = X can be any amino acid
  VARIANT 127: note = X can be any amino acid
  VARIANT 128: note = X can be any amino acid
  VARIANT 129: note = X can be any amino acid
  VARIANT 130: note = X can be any amino acid
  VARIANT 131: note = X can be any amino acid
  VARIANT 132: note = X can be any amino acid
  VARIANT 134: note = X can be any amino acid
  VARIANT 143: note = X can be any amino acid
  VARIANT 144: note = X can be any amino acid
  VARIANT 146: note = X can be any amino acid
  VARIANT 149: note = X can be any amino acid
  VARIANT 150: note = X can be any amino acid
  VARIANT 151: note = X can be any amino acid
  VARIANT 152: note = X can be any amino acid
  VARIANT 153: note = X can be any amino acid
  VARIANT 155: note = X can be any amino acid
  VARIANT 156: note = X can be any amino acid
  VARIANT 157: note = X can be any amino acid
  VARIANT 158: note = X can be any amino acid
  VARIANT 159: note = X can be any amino acid
  VARIANT 160: note = X can be any amino acid
  VARIANT 162: note = X can be any amino acid
  VARIANT 163: note = X can be any amino acid
  VARIANT 164: note = X can be any amino acid
  VARIANT 165: note = X can be any amino acid
  VARIANT 166: note = X can be any amino acid
  VARIANT 167: note = X can be any amino acid
  VARIANT 172: note = X can be any amino acid
  VARIANT 175: note = X can be any amino acid
  VARIANT 176: note = X can be any amino acid
  VARIANT 177: note = X can be any amino acid
  VARIANT 179: note = X can be any amino acid
  VARIANT 180: note = X can be any amino acid
  VARIANT 181: note = X can be any amino acid
  VARIANT 182: note = X can be any amino acid
  VARIANT 183: note = X can be any amino acid
  VARIANT 184: note = X can be any amino acid
  VARIANT 185: note = X can be any amino acid
  VARIANT 186: note = X can be any amino acid
  VARIANT 187: note = X can be any amino acid
  VARIANT 188: note = X can be any amino acid
  VARIANT 189: note = X can be any amino acid
  VARIANT 190: note = X can be any amino acid
  VARIANT 191: note = X can be any amino acid
  VARIANT 192: note = X can be any amino acid
  VARIANT 193: note = X can be any amino acid
  VARIANT 194: note = X can be any amino acid
  VARIANT 195: note = X can be any amino acid
  VARIANT 196: note = X can be any amino acid
  VARIANT 197: note = X can be any amino acid
  VARIANT 198: note = X can be any amino acid
  VARIANT 199: note = X can be any amino acid
  VARIANT 200: note = X can be any amino acid
  VARIANT 201: note = X can be any amino acid
  VARIANT 202: note = X can be any amino acid
  VARIANT 204: note = X can be any amino acid
  VARIANT 205: note = X can be any amino acid
  VARIANT 206: note = X can be any amino acid
  VARIANT 207: note = X can be any amino acid
  VARIANT 208: note = X can be any amino acid
  VARIANT 209: note = X can be any amino acid
  VARIANT 211: note = X can be any amino acid
  VARIANT 212: note = X can be any amino acid
  VARIANT 213: note = X can be any amino acid
  VARIANT 214: note = X can be any amino acid
  VARIANT 215: note = X can be any amino acid
  VARIANT 218: note = X can be any amino acid
  VARIANT 219: note = X can be any amino acid
  VARIANT 220: note = X can be any amino acid
  VARIANT 221: note = X can be any amino acid
  VARIANT 226: note = X can be any amino acid
  VARIANT 228: note = X can be any amino acid
  VARIANT 229: note = X can be any amino acid
  VARIANT 230: note = X can be any amino acid
  VARIANT 231: note = X can be any amino acid
  VARIANT 232: note = X can be any amino acid
  VARIANT 233: note = X can be any amino acid
  VARIANT 235: note = X can be any amino acid
  VARIANT 236: note = X can be any amino acid
  VARIANT 237: note = X can be any amino acid
  VARIANT 238: note = X can be any amino acid
  VARIANT 239: note = X can be any amino acid
  VARIANT 240: note = X can be any amino acid
  VARIANT 241: note = X can be any amino acid
  VARIANT 242: note = X can be any amino acid
  VARIANT 243: note = X can be any amino acid
  VARIANT 244: note = X can be any amino acid
  VARIANT 246: note = X can be any amino acid
  VARIANT 247: note = X can be any amino acid
  VARIANT 248: note = X can be any amino acid
  VARIANT 249: note = X can be any amino acid
  VARIANT 250: note = X can be any amino acid
  VARIANT 251: note = X can be any amino acid
  VARIANT 252: note = X can be any amino acid
YXXXXXXKXXXXXRXIXXPXXXLXXXQXXIXXXXLXXXXXHXXXXAXXXXXXXXXXAXXHXXXXWXXKXDXXXFFXXXXEXXXXXXFXXXGYXXLXXXEXARXCTXXXXXXXXXXXXXXXXXXXXXXXXXXXGXLPQGAPTSXXLXNLXXXXXDXXXXXXAXXXXXXYTRYXDDXXXSXXXXXXXXXXXXXXXXXXXXXXXXGXXXXXXKXXXXXPGXXXXVLGLXVXXXXXXLXXXXXXXXXXHXXXXXXX

SEQ ID NO: 19381 - protein, 237 aa, synthetic construct
  VARIANT 2: note = X can be any amino acid
  VARIANT 3: note = X can be any amino acid
  VARIANT 4: note = X can be any amino acid
  VARIANT 5: note = X can be any amino acid
  VARIANT 6: note = X can be any amino acid
  VARIANT 7: note = X can be any amino acid
  VARIANT 9: note = X can be any amino acid
  VARIANT 10: note = X can be any amino acid
  VARIANT 13: note = X can be any amino acid
  VARIANT 15: note = X can be any amino acid
  VARIANT 17: note = X can be any amino acid
  VARIANT 18: note = X can be any amino acid
  VARIANT 20: note = X can be any amino acid
  VARIANT 21: note = X can be any amino acid
  VARIANT 22: note = X can be any amino acid
  VARIANT 24: note = X can be any amino acid
  VARIANT 25: note = X can be any amino acid
  VARIANT 26: note = X can be any amino acid
  VARIANT 28: note = X can be any amino acid
  VARIANT 31: note = X can be any amino acid
  VARIANT 32: note = X can be any amino acid
  VARIANT 36: note = X can be any amino acid
  VARIANT 37: note = X can be any amino acid
  VARIANT 38: note = X can be any amino acid
  VARIANT 39: note = X can be any amino acid
  VARIANT 40: note = X can be any amino acid
  VARIANT 41: note = X can be any amino acid
  VARIANT 42: note = X can be any amino acid
  VARIANT 43: note = X can be any amino acid
  VARIANT 44: note = X can be any amino acid
  VARIANT 45: note = X can be any amino acid
  VARIANT 48: note = X can be any amino acid
  VARIANT 49: note = X can be any amino acid
  VARIANT 50: note = X can be any amino acid
  VARIANT 51: note = X can be any amino acid
  VARIANT 54: note = X can be any amino acid
  VARIANT 55: note = X can be any amino acid
  VARIANT 58: note = X can be any amino acid
  VARIANT 59: note = X can be any amino acid
  VARIANT 61: note = X can be any amino acid
  VARIANT 62: note = X can be any amino acid
  VARIANT 63: note = X can be any amino acid
  VARIANT 64: note = X can be any amino acid
  VARIANT 65: note = X can be any amino acid
  VARIANT 66: note = X can be any amino acid
  VARIANT 68: note = X can be any amino acid
  VARIANT 69: note = X can be any amino acid
  VARIANT 72: note = X can be any amino acid
  VARIANT 73: note = X can be any amino acid
  VARIANT 75: note = X can be any amino acid
  VARIANT 76: note = X can be any amino acid
  VARIANT 77: note = X can be any amino acid
  VARIANT 79: note = X can be any amino acid
  VARIANT 80: note = X can be any amino acid
  VARIANT 81: note = X can be any amino acid
  VARIANT 82: note = X can be any amino acid
  VARIANT 83: note = X can be any amino acid
  VARIANT 84: note = X can be any amino acid
  VARIANT 85: note = X can be any amino acid
  VARIANT 86: note = X can be any amino acid
  VARIANT 88: note = X can be any amino acid
  VARIANT 89: note = X can be any amino acid
  VARIANT 90: note = X can be any amino acid
  VARIANT 93: note = X can be any amino acid
  VARIANT 94: note = X can be any amino acid
  VARIANT 95: note = X can be any amino acid
  VARIANT 96: note = X can be any amino acid
  VARIANT 97: note = X can be any amino acid
  VARIANT 98: note = X can be any amino acid
  VARIANT 99: note = X can be any amino acid
  VARIANT 100: note = X can be any amino acid
  VARIANT 102: note = X can be any amino acid
  VARIANT 103: note = X can be any amino acid
  VARIANT 104: note = X can be any amino acid
  VARIANT 106: note = X can be any amino acid
  VARIANT 107: note = X can be any amino acid
  VARIANT 108: note = X can be any amino acid
  VARIANT 109: note = X can be any amino acid
  VARIANT 110: note = X can be any amino acid
  VARIANT 111: note = X can be any amino acid
  VARIANT 112: note = X can be any amino acid
  VARIANT 113: note = X can be any amino acid
  VARIANT 114: note = X can be any amino acid
  VARIANT 115: note = X can be any amino acid
  VARIANT 116: note = X can be any amino acid
  VARIANT 117: note = X can be any amino acid
  VARIANT 118: note = X can be any amino acid
  VARIANT 119: note = X can be any amino acid
  VARIANT 120: note = X can be any amino acid
  VARIANT 121: note = X can be any amino acid
  VARIANT 122: note = X can be any amino acid
  VARIANT 123: note = X can be any amino acid
  VARIANT 124: note = X can be any amino acid
  VARIANT 125: note = X can be any amino acid
  VARIANT 132: note = X can be any amino acid
  VARIANT 135: note = X can be any amino acid
  VARIANT 136: note = X can be any amino acid
  VARIANT 137: note = X can be any amino acid
  VARIANT 139: note = X can be any amino acid
  VARIANT 140: note = X can be any amino acid
  VARIANT 141: note = X can be any amino acid
  VARIANT 142: note = X can be any amino acid
  VARIANT 143: note = X can be any amino acid
  VARIANT 144: note = X can be any amino acid
  VARIANT 146: note = X can be any amino acid
  VARIANT 148: note = X can be any amino acid
  VARIANT 149: note = X can be any amino acid
  VARIANT 150: note = X can be any amino acid
  VARIANT 151: note = X can be any amino acid
  VARIANT 152: note = X can be any amino acid
  VARIANT 153: note = X can be any amino acid
  VARIANT 154: note = X can be any amino acid
  VARIANT 155: note = X can be any amino acid
  VARIANT 156: note = X can be any amino acid
  VARIANT 157: note = X can be any amino acid
  VARIANT 158: note = X can be any amino acid
  VARIANT 160: note = X can be any amino acid
  VARIANT 166: note = X can be any amino acid
  VARIANT 170: note = X can be any amino acid
  VARIANT 171: note = X can be any amino acid
  VARIANT 172: note = X can be any amino acid
  VARIANT 173: note = X can be any amino acid
  VARIANT 174: note = X can be any amino acid
  VARIANT 175: note = X can be any amino acid
  VARIANT 176: note = X can be any amino acid
  VARIANT 177: note = X can be any amino acid
  VARIANT 178: note = X can be any amino acid
  VARIANT 179: note = X can be any amino acid
  VARIANT 180: note = X can be any amino acid
  VARIANT 181: note = X can be any amino acid
  VARIANT 182: note = X can be any amino acid
  VARIANT 183: note = X can be any amino acid
  VARIANT 185: note = X can be any amino acid
  VARIANT 186: note = X can be any amino acid
  VARIANT 187: note = X can be any amino acid
  VARIANT 189: note = X can be any amino acid
  VARIANT 190: note = X can be any amino acid
  VARIANT 191: note = X can be any amino acid
  VARIANT 192: note = X can be any amino acid
  VARIANT 194: note = X can be any amino acid
  VARIANT 195: note = X can be any amino acid
  VARIANT 197: note = X can be any amino acid
  VARIANT 198: note = X can be any amino acid
  VARIANT 199: note = X can be any amino acid
  VARIANT 200: note = X can be any amino acid
  VARIANT 201: note = X can be any amino acid
  VARIANT 202: note = X can be any amino acid
  VARIANT 203: note = X can be any amino acid
  VARIANT 204: note = X can be any amino acid
  VARIANT 205: note = X can be any amino acid
  VARIANT 206: note = X can be any amino acid
  VARIANT 207: note = X can be any amino acid
  VARIANT 212: note = X can be any amino acid
  VARIANT 213: note = X can be any amino acid
  VARIANT 214: note = X can be any amino acid
  VARIANT 215: note = X can be any amino acid
  VARIANT 216: note = X can be any amino acid
  VARIANT 217: note = X can be any amino acid
  VARIANT 218: note = X can be any amino acid
  VARIANT 219: note = X can be any amino acid
  VARIANT 220: note = X can be any amino acid
  VARIANT 221: note = X can be any amino acid
  VARIANT 222: note = X can be any amino acid
  VARIANT 223: note = X can be any amino acid
  VARIANT 224: note = X can be any amino acid
  VARIANT 225: note = X can be any amino acid
  VARIANT 226: note = X can be any amino acid
  VARIANT 227: note = X can be any amino acid
  VARIANT 228: note = X can be any amino acid
  VARIANT 229: note = X can be any amino acid
  VARIANT 230: note = X can be any amino acid
  VARIANT 231: note = X can be any amino acid
  VARIANT 232: note = X can be any amino acid
  VARIANT 233: note = X can be any amino acid
  VARIANT 234: note = X can be any amino acid
  VARIANT 236: note = X can be any amino acid
YXXXXXXKXXGGXRXIXXPXXXLXXXQXWIXXNILXXXXXXXXXXGFXXXXSIXXNAXXHXXXXXXLXXDLXXFXXXIXXXXXXXXFXXXGYXXXXXXXXAXXXTXXXXXXXXXXXXXXXXXXXXLPQGAPXSPXXXNXXXXXXDXRXXXXXXXXXXXYXRYADDXTFSXXXXXXXXXXXXXXIXXXEXXXXNXXKXXXXXXXXXXXVTGLXXXXXXXXXXXXXXXXXXXXXXXCXK

SEQ ID NO: 19382 - protein, 221 aa, synthetic construct
  VARIANT 2: note = X can be any amino acid
  VARIANT 3: note = X can be any amino acid
  VARIANT 4: note = X can be any amino acid
  VARIANT 5: note = X can be any amino acid
  VARIANT 7: note = X can be any amino acid
  VARIANT 9: note = X can be any amino acid
  VARIANT 10: note = X can be any amino acid
  VARIANT 12: note = X can be any amino acid
  VARIANT 13: note = X can be any amino acid
  VARIANT 15: note = X can be any amino acid
  VARIANT 16: note = X can be any amino acid
  VARIANT 17: note = X can be any amino acid
  VARIANT 18: note = X can be any amino acid
  VARIANT 20: note = X can be any amino acid
  VARIANT 21: note = X can be any amino acid
  VARIANT 22: note = X can be any amino acid
  VARIANT 25: note = X can be any amino acid
  VARIANT 26: note = X can be any amino acid
  VARIANT 28: note = X can be any amino acid
  VARIANT 32: note = X can be any amino acid
  VARIANT 33: note = X can be any amino acid
  VARIANT 36: note = X can be any amino acid
  VARIANT 37: note = X can be any amino acid
  VARIANT 38: note = X can be any amino acid
  VARIANT 39: note = X can be any amino acid
  VARIANT 40: note = X can be any amino acid
  VARIANT 41: note = X can be any amino acid
  VARIANT 42: note = X can be any amino acid
  VARIANT 43: note = X can be any amino acid
  VARIANT 44: note = X can be any amino acid
  VARIANT 45: note = X can be any amino acid
  VARIANT 48: note = X can be any amino acid
  VARIANT 49: note = X can be any amino acid
  VARIANT 50: note = X can be any amino acid
  VARIANT 51: note = X can be any amino acid
  VARIANT 54: note = X can be any amino acid
  VARIANT 55: note = X can be any amino acid
  VARIANT 58: note = X can be any amino acid
  VARIANT 59: note = X can be any amino acid
  VARIANT 61: note = X can be any amino acid
  VARIANT 62: note = X can be any amino acid
  VARIANT 63: note = X can be any amino acid
  VARIANT 64: note = X can be any amino acid
  VARIANT 65: note = X can be any amino acid
  VARIANT 66: note = X can be any amino acid
  VARIANT 67: note = X can be any amino acid
  VARIANT 68: note = X can be any amino acid
  VARIANT 69: note = X can be any amino acid
  VARIANT 71: note = X can be any amino acid
  VARIANT 72: note = X can be any amino acid
  VARIANT 73: note = X can be any amino acid
  VARIANT 77: note = X can be any amino acid
  VARIANT 79: note = X can be any amino acid
  VARIANT 80: note = X can be any amino acid
  VARIANT 81: note = X can be any amino acid
  VARIANT 82: note = X can be any amino acid
  VARIANT 83: note = X can be any amino acid
  VARIANT 84: note = X can be any amino acid
  VARIANT 85: note = X can be any amino acid
  VARIANT 86: note = X can be any amino acid
  VARIANT 88: note = X can be any amino acid
  VARIANT 89: note = X can be any amino acid
  VARIANT 90: note = X can be any amino acid
  VARIANT 93: note = X can be any amino acid
  VARIANT 94: note = X can be any amino acid
  VARIANT 95: note = X can be any amino acid
  VARIANT 96: note = X can be any amino acid
  VARIANT 97: note = X can be any amino acid
  VARIANT 98: note = X can be any amino acid
  VARIANT 99: note = X can be any amino acid
  VARIANT 100: note = X can be any amino acid
  VARIANT 101: note = X can be any amino acid
  VARIANT 102: note = X can be any amino acid
  VARIANT 103: note = X can be any amino acid
  VARIANT 106: note = X can be any amino acid
  VARIANT 107: note = X can be any amino acid
  VARIANT 108: note = X can be any amino acid
  VARIANT 109: note = X can be any amino acid
  VARIANT 114: note = X can be any amino acid
  VARIANT 116: note = X can be any amino acid
  VARIANT 119: note = X can be any amino acid
  VARIANT 120: note = X can be any amino acid
  VARIANT 121: note = X can be any amino acid
  VARIANT 123: note = X can be any amino acid
  VARIANT 124: note = X can be any amino acid
  VARIANT 125: note = X can be any amino acid
  VARIANT 126: note = X can be any amino acid
  VARIANT 127: note = X can be any amino acid
  VARIANT 128: note = X can be any amino acid
  VARIANT 130: note = X can be any amino acid
  VARIANT 132: note = X can be any amino acid
  VARIANT 133: note = X can be any amino acid
  VARIANT 134: note = X can be any amino acid
  VARIANT 135: note = X can be any amino acid
  VARIANT 136: note = X can be any amino acid
  VARIANT 137: note = X can be any amino acid
  VARIANT 138: note = X can be any amino acid
  VARIANT 139: note = X can be any amino acid
  VARIANT 140: note = X can be any amino acid
  VARIANT 141: note = X can be any amino acid
  VARIANT 142: note = X can be any amino acid
  VARIANT 144: note = X can be any amino acid
  VARIANT 150: note = X can be any amino acid
  VARIANT 152: note = X can be any amino acid
  VARIANT 155: note = X can be any amino acid
  VARIANT 156: note = X can be any amino acid
  VARIANT 157: note = X can be any amino acid
  VARIANT 158: note = X can be any amino acid
  VARIANT 159: note = X can be any amino acid
  VARIANT 160: note = X can be any amino acid
  VARIANT 161: note = X can be any amino acid
  VARIANT 162: note = X can be any amino acid
  VARIANT 163: note = X can be any amino acid
  VARIANT 164: note = X can be any amino acid
  VARIANT 165: note = X can be any amino acid
  VARIANT 166: note = X can be any amino acid
  VARIANT 167: note = X can be any amino acid
  VARIANT 169: note = X can be any amino acid
  VARIANT 170: note = X can be any amino acid
  VARIANT 171: note = X can be any amino acid
  VARIANT 172: note = X can be any amino acid
  VARIANT 173: note = X can be any amino acid
  VARIANT 174: note = X can be any amino acid
  VARIANT 175: note = X can be any amino acid
  VARIANT 176: note = X can be any amino acid
  VARIANT 178: note = X can be any amino acid
  VARIANT 179: note = X can be any amino acid
  VARIANT 181: note = X can be any amino acid
  VARIANT 182: note = X can be any amino acid
  VARIANT 183: note = X can be any amino acid
  VARIANT 184: note = X can be any amino acid
  VARIANT 185: note = X can be any amino acid
  VARIANT 186: note = X can be any amino acid
  VARIANT 187: note = X can be any amino acid
  VARIANT 188: note = X can be any amino acid
  VARIANT 189: note = X can be any amino acid
  VARIANT 191: note = X can be any amino acid
  VARIANT 195: note = X can be any amino acid
  VARIANT 196: note = X can be any amino acid
  VARIANT 199: note = X can be any amino acid
  VARIANT 200: note = X can be any amino acid
  VARIANT 201: note = X can be any amino acid
  VARIANT 202: note = X can be any amino acid
  VARIANT 203: note = X can be any amino acid
  VARIANT 204: note = X can be any amino acid
  VARIANT 205: note = X can be any amino acid
  VARIANT 206: note = X can be any amino acid
  VARIANT 207: note = X can be any amino acid
  VARIANT 208: note = X can be any amino acid
  VARIANT 209: note = X can be any amino acid
  VARIANT 210: note = X can be any amino acid
  VARIANT 211: note = X can be any amino acid
  VARIANT 212: note = X can be any amino acid
  VARIANT 213: note = X can be any amino acid
  VARIANT 214: note = X can be any amino acid
  VARIANT 217: note = X can be any amino acid
  VARIANT 218: note = X can be any amino acid
  VARIANT 219: note = X can be any amino acid
  VARIANT 221: note = X can be any amino acid
YXXXXIXKXXGXXRXXXXPXXXLKXXQXWILXXILXXXXXXXXXXGFXXXXSIXXNAXXHXXXXXXXXXDXXXFFPXIXXXXXXXXFXXXGYXXXXXXXXXXXCTXXXXLPQGXPXSPXXXNXXXXXXDXRXXXXXXXXXXXYXRYADDXTXSGXXXXXXXXXXXXXIXXXXXXXXNXXKXXXXXXXXXQXVTGXXVNXXXXXXXXXXXXXXXXIYXXXKX

SEQ ID NO: 19383 - protein, 222 aa, synthetic construct
  VARIANT 2: note = X can be any amino acid
  VARIANT 3: note = X can be any amino acid
  VARIANT 4: note = X can be any amino acid
  VARIANT 5: note = X can be any amino acid
  VARIANT 6: note = X can be any amino acid
  VARIANT 7: note = X can be any amino acid
  VARIANT 8: note = X can be any amino acid
  VARIANT 9: note = X can be any amino acid
  VARIANT 10: note = X can be any amino acid
  VARIANT 11: note = X can be any amino acid
  VARIANT 12: note = X can be any amino acid
  VARIANT 13: note = X can be any amino acid
  VARIANT 15: note = X can be any amino acid
  VARIANT 16: note = X can be any amino acid
  VARIANT 17: note = X can be any amino acid
  VARIANT 18: note = X can be any amino acid
  VARIANT 20: note = X can be any amino acid
  VARIANT 21: note = X can be any amino acid
  VARIANT 22: note = X can be any amino acid
  VARIANT 25: note = X can be any amino acid
  VARIANT 26: note = X can be any amino acid
  VARIANT 28: note = X can be any amino acid
  VARIANT 31: note = X can be any amino acid
  VARIANT 32: note = X can be any amino acid
  VARIANT 36: note = X can be any amino acid
  VARIANT 37: note = X can be any amino acid
  VARIANT 38: note = X can be any amino acid
  VARIANT 39: note = X can be any amino acid
  VARIANT 40: note = X can be any amino acid
  VARIANT 41: note = X can be any amino acid
  VARIANT 42: note = X can be any amino acid
  VARIANT 43: note = X can be any amino acid
  VARIANT 44: note = X can be any amino acid
  VARIANT 45: note = X can be any amino acid
  VARIANT 46: note = X can be any amino acid
  VARIANT 47: note = X can be any amino acid
  VARIANT 48: note = X can be any amino acid
  VARIANT 49: note = X can be any amino acid
  VARIANT 50: note = X can be any amino acid
  VARIANT 51: note = X can be any amino acid
  VARIANT 54: note = X can be any amino acid
  VARIANT 55: note = X can be any amino acid
  VARIANT 58: note = X can be any amino acid
  VARIANT 59: note = X can be any amino acid
  VARIANT 61: note = X can be any amino acid
  VARIANT 62: note = X can be any amino acid
  VARIANT 63: note = X can be any amino acid
  VARIANT 64: note = X can be any amino acid
  VARIANT 65: note = X can be any amino acid
  VARIANT 66: note = X can be any amino acid
  VARIANT 67: note = X can be any amino acid
  VARIANT 68: note = X can be any amino acid
  VARIANT 69: note = X can be any amino acid
  VARIANT 72: note = X can be any amino acid
  VARIANT 73: note = X can be any amino acid
  VARIANT 76: note = X can be any amino acid
  VARIANT 79: note = X can be any amino acid
  VARIANT 80: note = X can be any amino acid
  VARIANT 81: note = X can be any amino acid
  VARIANT 82: note = X can be any amino acid
  VARIANT 83: note = X can be any amino acid
  VARIANT 84: note = X can be any amino acid
  VARIANT 85: note = X can be any amino acid
  VARIANT 86: note = X can be any amino acid
  VARIANT 88: note = X can be any amino acid
  VARIANT 89: note = X can be any amino acid
  VARIANT 90: note = X can be any amino acid
  VARIANT 91: note = X can be any amino acid
  VARIANT 92: note = X can be any amino acid
  VARIANT 93: note = X can be any amino acid
  VARIANT 94: note = X can be any amino acid
  VARIANT 95: note = X can be any amino acid
  VARIANT 96: note = X can be any amino acid
  VARIANT 97: note = X can be any amino acid
  VARIANT 98: note = X can be any amino acid
  VARIANT 99: note = X can be any amino acid
  VARIANT 100: note = X can be any amino acid
  VARIANT 101: note = X can be any amino acid
  VARIANT 102: note = X can be any amino acid
  VARIANT 103: note = X can be any amino acid
  VARIANT 104: note = X can be any amino acid
  VARIANT 105: note = X can be any amino acid
  VARIANT 106: note = X can be any amino acid
  VARIANT 107: note = X can be any amino acid
  VARIANT 108: note = X can be any amino acid
  VARIANT 109: note = X can be any amino acid
  VARIANT 110: note = X can be any amino acid
  VARIANT 112: note = X can be any amino acid
  VARIANT 115: note = X can be any amino acid
  VARIANT 117: note = X can be any amino acid
  VARIANT 120: note = X can be any amino acid
  VARIANT 121: note = X can be any amino acid
  VARIANT 122: note = X can be any amino acid
  VARIANT 124: note = X can be any amino acid
  VARIANT 125: note = X can be any amino acid
  VARIANT 126: note = X can be any amino acid
  VARIANT 127: note = X can be any amino acid
  VARIANT 128: note = X can be any amino acid
  VARIANT 129: note = X can be any amino acid
  VARIANT 131: note = X can be any amino acid
  VARIANT 132: note = X can be any amino acid
  VARIANT 133: note = X can be any amino acid
  VARIANT 134: note = X can be any amino acid
  VARIANT 135: note = X can be any amino acid
  VARIANT 136: note = X can be any amino acid
  VARIANT 137: note = X can be any amino acid
  VARIANT 138: note = X can be any amino acid
  VARIANT 139: note = X can be any amino acid
  VARIANT 140: note = X can be any amino acid
  VARIANT 141: note = X can be any amino acid
  VARIANT 142: note = X can be any amino acid
  VARIANT 143: note = X can be any amino acid
  VARIANT 145: note = X can be any amino acid
  VARIANT 151: note = X can be any amino acid
  VARIANT 152: note = X can be any amino acid
  VARIANT 153: note = X can be any amino acid
  VARIANT 155: note = X can be any amino acid
  VARIANT 156: note = X can be any amino acid
  VARIANT 157: note = X can be any amino acid
  VARIANT 158: note = X can be any amino acid
  VARIANT 159: note = X can be any amino acid
  VARIANT 160: note = X can be any amino acid
  VARIANT 161: note = X can be any amino acid
  VARIANT 162: note = X can be any amino acid
  VARIANT 163: note = X can be any amino acid
  VARIANT 164: note = X can be any amino acid
  VARIANT 165: note = X can be any amino acid
  VARIANT 166: note = X can be any amino acid
  VARIANT 167: note = X can be any amino acid
  VARIANT 168: note = X can be any amino acid
  VARIANT 169: note = X can be any amino acid
  VARIANT 170: note = X can be any amino acid
  VARIANT 171: note = X can be any amino acid
  VARIANT 172: note = X can be any amino acid
  VARIANT 173: note = X can be any amino acid
  VARIANT 174: note = X can be any amino acid
  VARIANT 175: note = X can be any amino acid
  VARIANT 176: note = X can be any amino acid
  VARIANT 177: note = X can be any amino acid
  VARIANT 178: note = X can be any amino acid
  VARIANT 180: note = X can be any amino acid
  VARIANT 181: note = X can be any amino acid
  VARIANT 184: note = X can be any amino acid
  VARIANT 185: note = X can be any amino acid
  VARIANT 186: note = X can be any amino acid
  VARIANT 187: note = X can be any amino acid
  VARIANT 188: note = X can be any amino acid
  VARIANT 189: note = X can be any amino acid
  VARIANT 190: note = X can be any amino acid
  VARIANT 191: note = X can be any amino acid
  VARIANT 192: note = X can be any amino acid
  VARIANT 193: note = X can be any amino acid
  VARIANT 194: note = X can be any amino acid
  VARIANT 197: note = X can be any amino acid
  VARIANT 198: note = X can be any amino acid
  VARIANT 199: note = X can be any amino acid
  VARIANT 200: note = X can be any amino acid
  VARIANT 201: note = X can be any amino acid
  VARIANT 202: note = X can be any amino acid
  VARIANT 203: note = X can be any amino acid
  VARIANT 204: note = X can be any amino acid
  VARIANT 205: note = X can be any amino acid
  VARIANT 206: note = X can be any amino acid
  VARIANT 207: note = X can be any amino acid
  VARIANT 208: note = X can be any amino acid
  VARIANT 209: note = X can be any amino acid
  VARIANT 210: note = X can be any amino acid
  VARIANT 211: note = X can be any amino acid
  VARIANT 212: note = X can be any amino acid
  VARIANT 213: note = X can be any amino acid
  VARIANT 214: note = X can be any amino acid
  VARIANT 215: note = X can be any amino acid
  VARIANT 217: note = X can be any amino acid
  VARIANT 218: note = X can be any amino acid
  VARIANT 221: note = X can be any amino acid
  VARIANT 222: note = X can be any amino acid
YXXXXXXXXXXXXRXXXXPXXXLKXXQXWIXXNILXXXXXXXXXXXXXXXXSIXXNAXXHXXXXXXXXXDIXXFFXSIXXXXXXXXFXXXXXXXXXXXXXXXXXXXXXXXLXQGXPXSPXXXNXXXXXXDXXXXXXXXXXXXXYXRYADDXXXSXXXXXXXXXXXXXXXXXXXXXXXXNXXKTXXXXXXXXXXXTGXXXXXXXXXXXXXXXXXXXEXXYCXX

SEQ ID NO: 19384 - protein, 237 aa, synthetic construct
  VARIANT 2: note = X can be any amino acid
  VARIANT 3: note = X can be any amino acid
  VARIANT 4: note = X can be any amino acid
  VARIANT 5: note = X can be any amino acid
  VARIANT 6: note = X can be any amino acid
  VARIANT 7: note = X can be any amino acid
  VARIANT 9: note = X can be any amino acid
  VARIANT 10: note = X can be any amino acid
  VARIANT 12: note = X can be any amino acid
  VARIANT 13: note = X can be any amino acid
  VARIANT 15: note = X can be any amino acid
  VARIANT 16: note = X can be any amino acid
  VARIANT 17: note = X can be any amino acid
  VARIANT 18: note = X can be any amino acid
  VARIANT 20: note = X can be any amino acid
  VARIANT 21: note = X can be any amino acid
  VARIANT 22: note = X can be any amino acid
  VARIANT 23: note = X can be any amino acid
  VARIANT 25: note = X can be any amino acid
  VARIANT 26: note = X can be any amino acid
  VARIANT 28: note = X can be any amino acid
  VARIANT 32: note = X can be any amino acid
  VARIANT 36: note = X can be any amino acid
  VARIANT 37: note = X can be any amino acid
  VARIANT 38: note = X can be any amino acid
  VARIANT 39: note = X can be any amino acid
  VARIANT 40: note = X can be any amino acid
  VARIANT 43: note = X can be any amino acid
  VARIANT 44: note = X can be any amino acid
  VARIANT 45: note = X can be any amino acid
  VARIANT 46: note = X can be any amino acid
  VARIANT 49: note = X can be any amino acid
  VARIANT 51: note = X can be any amino acid
  VARIANT 52: note = X can be any amino acid
  VARIANT 53: note = X can be any amino acid
  VARIANT 54: note = X can be any amino acid
  VARIANT 55: note = X can be any amino acid
  VARIANT 56: note = X can be any amino acid
  VARIANT 57: note = X can be any amino acid
  VARIANT 58: note = X can be any amino acid
  VARIANT 59: note = X can be any amino acid
  VARIANT 60: note = X can be any amino acid
  VARIANT 61: note = X can be any amino acid
  VARIANT 64: note = X can be any amino acid
  VARIANT 65: note = X can be any amino acid
  VARIANT 68: note = X can be any amino acid
  VARIANT 69: note = X can be any amino acid
  VARIANT 72: note = X can be any amino acid
  VARIANT 73: note = X can be any amino acid
  VARIANT 75: note = X can be any amino acid
  VARIANT 76: note = X can be any amino acid
  VARIANT 79: note = X can be any amino acid
  VARIANT 82: note = X can be any amino acid
  VARIANT 83: note = X can be any amino acid
  VARIANT 86: note = X can be any amino acid
  VARIANT 88: note = X can be any amino acid
  VARIANT 89: note = X can be any amino acid
  VARIANT 90: note = X can be any amino acid
  VARIANT 91: note = X can be any amino acid
  VARIANT 92: note = X can be any amino acid
  VARIANT 94: note = X can be any amino acid
  VARIANT 95: note = X can be any amino acid
  VARIANT 96: note = X can be any amino acid
  VARIANT 98: note = X can be any amino acid
  VARIANT 99: note = X can be any amino acid
  VARIANT 100: note = X can be any amino acid
  VARIANT 101: note = X can be any amino acid
  VARIANT 102: note = X can be any amino acid
  VARIANT 103: note = X can be any amino acid
  VARIANT 104: note = X can be any amino acid
  VARIANT 105: note = X can be any amino acid
  VARIANT 106: note = X can be any amino acid
  VARIANT 107: note = X can be any amino acid
  VARIANT 108: note = X can be any amino acid
  VARIANT 109: note = X can be any amino acid
  VARIANT 110: note = X can be any amino acid
  VARIANT 112: note = X can be any amino acid
  VARIANT 113: note = X can be any amino acid
  VARIANT 114: note = X can be any amino acid
  VARIANT 116: note = X can be any amino acid
  VARIANT 117: note = X can be any amino acid
  VARIANT 118: note = X can be any amino acid
  VARIANT 119: note = X can be any amino acid
  VARIANT 120: note = X can be any amino acid
  VARIANT 121: note = X can be any amino acid
  VARIANT 122: note = X can be any amino acid
  VARIANT 125: note = X can be any amino acid
  VARIANT 126: note = X can be any amino acid
  VARIANT 131: note = X can be any amino acid
  VARIANT 133: note = X can be any amino acid
  VARIANT 135: note = X can be any amino acid
  VARIANT 137: note = X can be any amino acid
  VARIANT 138: note = X can be any amino acid
  VARIANT 139: note = X can be any amino acid
  VARIANT 141: note = X can be any amino acid
  VARIANT 142: note = X can be any amino acid
  VARIANT 143: note = X can be any amino acid
  VARIANT 144: note = X can be any amino acid
  VARIANT 145: note = X can be any amino acid
  VARIANT 146: note = X can be any amino acid
  VARIANT 147: note = X can be any amino acid
  VARIANT 148: note = X can be any amino acid
  VARIANT 149: note = X can be any amino acid
  VARIANT 151: note = X can be any amino acid
  VARIANT 153: note = X can be any amino acid
  VARIANT 157: note = X can be any amino acid
  VARIANT 163: note = X can be any amino acid
  VARIANT 166: note = X can be any amino acid
  VARIANT 167: note = X can be any amino acid
  VARIANT 168: note = X can be any amino acid
  VARIANT 169: note = X can be any amino acid
  VARIANT 170: note = X can be any amino acid
  VARIANT 171: note = X can be any amino acid
  VARIANT 173: note = X can be any amino acid
  VARIANT 174: note = X can be any amino acid
  VARIANT 175: note = X can be any amino acid
  VARIANT 176: note = X can be any amino acid
  VARIANT 177: note = X can be any amino acid
  VARIANT 178: note = X can be any amino acid
  VARIANT 179: note = X can be any amino acid
  VARIANT 180: note = X can be any amino acid
  VARIANT 181: note = X can be any amino acid
  VARIANT 184: note = X can be any amino acid
  VARIANT 185: note = X can be any amino acid
  VARIANT 186: note = X can be any amino acid
  VARIANT 187: note = X can be any amino acid
  VARIANT 190: note = X can be any amino acid
  VARIANT 192: note = X can be any amino acid
  VARIANT 193: note = X can be any amino acid
  VARIANT 195: note = X can be any amino acid
  VARIANT 196: note = X can be any amino acid
  VARIANT 197: note = X can be any amino acid
  VARIANT 198: note = X can be any amino acid
  VARIANT 199: note = X can be any amino acid
  VARIANT 200: note = X can be any amino acid
  VARIANT 201: note = X can be any amino acid
  VARIANT 202: note = X can be any amino acid
  VARIANT 203: note = X can be any amino acid
  VARIANT 204: note = X can be any amino acid
  VARIANT 206: note = X can be any amino acid
  VARIANT 212: note = X can be any amino acid
  VARIANT 213: note = X can be any amino acid
  VARIANT 214: note = X can be any amino acid
  VARIANT 215: note = X can be any amino acid
  VARIANT 216: note = X can be any amino acid
  VARIANT 219: note = X can be any amino acid
  VARIANT 221: note = X can be any amino acid
  VARIANT 222: note = X can be any amino acid
  VARIANT 224: note = X can be any amino acid
  VARIANT 225: note = X can be any amino acid
  VARIANT 226: note = X can be any amino acid
  VARIANT 229: note = X can be any amino acid
  VARIANT 230: note = X can be any amino acid
  VARIANT 232: note = X can be any amino acid
  VARIANT 233: note = X can be any amino acid
  VARIANT 234: note = X can be any amino acid
  VARIANT 235: note = X can be any amino acid
  VARIANT 236: note = X can be any amino acid
  VARIANT 237: note = X can be any amino acid
YXXXXXXKXXGXXRXXXXPXXXXRXXQXRINXRIFXXXXXWPXXXXGSXPXXXXXXXXXXXDYXXCAXXHCXXKXXLKXDIXXFFXNXXXXXVXXXFXXXXXXXXXXXXXLXXXCXXXXXXXQGXXTSSYXAXLXLXXXEXXXXXXXXXKXLXYTRXVDDITXSSXXXXXXFXXXXXXXXXMLXXXXLPXNXXKXXXXXXXXXXLXVHGLRXXXXXPRXPXXEXXXIRXXVXXXXXX

SEQ ID NO: 19385 - protein, 236 aa, synthetic construct
  VARIANT 2: note = X can be any amino acid
  VARIANT 3: note = X can be any amino acid
  VARIANT 4: note = X can be any amino acid
  VARIANT 5: note = X can be any amino acid
  VARIANT 6: note = X can be any amino acid
  VARIANT 7: note = X can be any amino acid
  VARIANT 8: note = X can be any amino acid
  VARIANT 9: note = X can be any amino acid
  VARIANT 10: note = X can be any amino acid
  VARIANT 11: note = X can be any amino acid
  VARIANT 12: note = X can be any amino acid
  VARIANT 14: note = X can be any amino acid
  VARIANT 16: note = X can be any amino acid
  VARIANT 17: note = X can be any amino acid
  VARIANT 18: note = X can be any amino acid
  VARIANT 19: note = X can be any amino acid
  VARIANT 21: note = X can be any amino acid
  VARIANT 22: note = X can be any amino acid
  VARIANT 23: note = X can be any amino acid
  VARIANT 26: note = X can be any amino acid
  VARIANT 27: note = X can be any amino acid
  VARIANT 33: note = X can be any amino acid
  VARIANT 34: note = X can be any amino acid
  VARIANT 37: note = X can be any amino acid
  VARIANT 38: note = X can be any amino acid
  VARIANT 39: note = X can be any amino acid
  VARIANT 40: note = X can be any amino acid
  VARIANT 41: note = X can be any amino acid
  VARIANT 43: note = X can be any amino acid
  VARIANT 46: note = X can be any amino acid
  VARIANT 49: note = X can be any amino acid
  VARIANT 50: note = X can be any amino acid
  VARIANT 51: note = X can be any amino acid
  VARIANT 52: note = X can be any amino acid
  VARIANT 53: note = X can be any amino acid
  VARIANT 54: note = X can be any amino acid
  VARIANT 55: note = X can be any amino acid
  VARIANT 59: note = X can be any amino acid
  VARIANT 60: note = X can be any amino acid
  VARIANT 62: note = X can be any amino acid
  VARIANT 63: note = X can be any amino acid
  VARIANT 64: note = X can be any amino acid
  VARIANT 66: note = X can be any amino acid
  VARIANT 67: note = X can be any amino acid
  VARIANT 68: note = X can be any amino acid
  VARIANT 69: note = X can be any amino acid
  VARIANT 70: note = X can be any amino acid
  VARIANT 71: note = X can be any amino acid
  VARIANT 73: note = X can be any amino acid
  VARIANT 76: note = X can be any amino acid
  VARIANT 77: note = X can be any amino acid
  VARIANT 78: note = X can be any amino acid
  VARIANT 81: note = X can be any amino acid
  VARIANT 82: note = X can be any amino acid
  VARIANT 84: note = X can be any amino acid
  VARIANT 85: note = X can be any amino acid
  VARIANT 86: note = X can be any amino acid
  VARIANT 87: note = X can be any amino acid
  VARIANT 89: note = X can be any amino acid
  VARIANT 90: note = X can be any amino acid
  VARIANT 91: note = X can be any amino acid
  VARIANT 92: note = X can be any amino acid
  VARIANT 93: note = X can be any amino acid
  VARIANT 94: note = X can be any amino acid
  VARIANT 95: note = X can be any amino acid
  VARIANT 96: note = X can be any amino acid
  VARIANT 97: note = X can be any amino acid
  VARIANT 99: note = X can be any amino acid
  VARIANT 100: note = X can be any amino acid
  VARIANT 101: note = X can be any amino acid
  VARIANT 103: note = X can be any amino acid
  VARIANT 104: note = X can be any amino acid
  VARIANT 105: note = X can be any amino acid
  VARIANT 107: note = X can be any amino acid
  VARIANT 108: note = X can be any amino acid
  VARIANT 110: note = X can be any amino acid
  VARIANT 112: note = X can be any amino acid
  VARIANT 113: note = X can be any amino acid
  VARIANT 114: note = X can be any amino acid
  VARIANT 115: note = X can be any amino acid
  VARIANT 116: note = X can be any amino acid
  VARIANT 120: note = X can be any amino acid
  VARIANT 126: note = X can be any amino acid
  VARIANT 130: note = X can be any amino acid
  VARIANT 131: note = X can be any amino acid
  VARIANT 132: note = X can be any amino acid
  VARIANT 133: note = X can be any amino acid
  VARIANT 134: note = X can be any amino acid
  VARIANT 137: note = X can be any amino acid
  VARIANT 138: note = X can be any amino acid
  VARIANT 139: note = X can be any amino acid
  VARIANT 140: note = X can be any amino acid
  VARIANT 141: note = X can be any amino acid
  VARIANT 142: note = X can be any amino acid
  VARIANT 143: note = X can be any amino acid
  VARIANT 144: note = X can be any amino acid
  VARIANT 145: note = X can be any amino acid
  VARIANT 146: note = X can be any amino acid
  VARIANT 147: note = X can be any amino acid
  VARIANT 148: note = X can be any amino acid
  VARIANT 150: note = X can be any amino acid
  VARIANT 156: note = X can be any amino acid
  VARIANT 158: note = X can be any amino acid
  VARIANT 160: note = X can be any amino acid
  VARIANT 161: note = X can be any amino acid
  VARIANT 162: note = X can be any amino acid
  VARIANT 163: note = X can be any amino acid
  VARIANT 164: note = X can be any amino acid
  VARIANT 165: note = X can be any amino acid
  VARIANT 166: note = X can be any amino acid
  VARIANT 167: note = X can be any amino acid
  VARIANT 168: note = X can be any amino acid
  VARIANT 169: note = X can be any amino acid
  VARIANT 170: note = X can be any amino acid
  VARIANT 171: note = X can be any amino acid
  VARIANT 172: note = X can be any amino acid
  VARIANT 174: note = X can be any amino acid
  VARIANT 175: note = X can be any amino acid
  VARIANT 176: note = X can be any amino acid
  VARIANT 177: note = X can be any amino acid
  VARIANT 178: note = X can be any amino acid
  VARIANT 179: note = X can be any amino acid
  VARIANT 180: note = X can be any amino acid
  VARIANT 181: note = X can be any amino acid
  VARIANT 182: note = X can be any amino acid
  VARIANT 183: note = X can be any amino acid
  VARIANT 184: note = X can be any amino acid
  VARIANT 186: note = X can be any amino acid
  VARIANT 187: note = X can be any amino acid
  VARIANT 188: note = X can be any amino acid
  VARIANT 189: note = X can be any amino acid
  VARIANT 190: note = X can be any amino acid
  VARIANT 192: note = X can be any amino acid
  VARIANT 193: note = X can be any amino acid
  VARIANT 194: note = X can be any amino acid
  VARIANT 195: note = X can be any amino acid
  VARIANT 196: note = X can be any amino acid
  VARIANT 197: note = X can be any amino acid
  VARIANT 198: note = X can be any amino acid
  VARIANT 199: note = X can be any amino acid
  VARIANT 200: note = X can be any amino acid
  VARIANT 201: note = X can be any amino acid
  VARIANT 202: note = X can be any amino acid
  VARIANT 203: note = X can be any amino acid
  VARIANT 204: note = X can be any amino acid
  VARIANT 205: note = X can be any amino acid
  VARIANT 211: note = X can be any amino acid
  VARIANT 212: note = X can be any amino acid
  VARIANT 213: note = X can be any amino acid
  VARIANT 214: note = X can be any amino acid
  VARIANT 215: note = X can be any amino acid
  VARIANT 217: note = X can be any amino acid
  VARIANT 218: note = X can be any amino acid
  VARIANT 219: note = X can be any amino acid
  VARIANT 220: note = X can be any amino acid
  VARIANT 221: note = X can be any amino acid
  VARIANT 222: note = X can be any amino acid
  VARIANT 224: note = X can be any amino acid
  VARIANT 225: note = X can be any amino acid
  VARIANT 228: note = X can be any amino acid
  VARIANT 229: note = X can be any amino acid
  VARIANT 231: note = X can be any amino acid
  VARIANT 232: note = X can be any amino acid
  VARIANT 234: note = X can be any amino acid
  VARIANT 235: note = X can be any amino acid
  VARIANT 236: note = X can be any amino acid
YXXXXXXXXXXXKXRXXXXPXXXLKXXQKRINXXIFXXXXXPXYLXGGXXXXXXXRDYXXNXXXHXXXXXXIXLDXXXFYXXIXXXXVXXXXXXXXXFXXXVXXXLXXLXTXXXXXPQGXCTSSYXANLXXXXXEYXXXXXXXXXXXXYXRLLDDXTXSXXXXXXXXXXXXXIXXXXXXXXXXXLXXXXXKXXXXXXXXXXXXXXVTGLWXXXXXPXXXXXXRXXIRXXVXXCXXX

SEQ ID NO: 19386 - protein, 223 aa, synthetic construct
  VARIANT 1: note = X can be any amino acid
  VARIANT 2: note = X can be any amino acid
  VARIANT 3: note = X can be any amino acid
  VARIANT 4: note = X can be any amino acid
  VARIANT 5: note = X can be any amino acid
  VARIANT 6: note = X can be any amino acid
  VARIANT 7: note = X can be any amino acid
  VARIANT 8: note = X can be any amino acid
  VARIANT 9: note = X can be any amino acid
  VARIANT 10: note = X can be any amino acid
  VARIANT 11: note = X can be any amino acid
  VARIANT 12: note = X can be any amino acid
  VARIANT 13: note = X can be any amino acid
  VARIANT 15: note = X can be any amino acid
  VARIANT 16: note = X can be any amino acid
  VARIANT 17: note = X can be any amino acid
  VARIANT 18: note = X can be any amino acid
  VARIANT 19: note = X can be any amino acid
  VARIANT 20: note = X can be any amino acid
  VARIANT 21: note = X can be any amino acid
  VARIANT 22: note = X can be any amino acid
  VARIANT 24: note = X can be any amino acid
  VARIANT 25: note = X can be any amino acid
  VARIANT 26: note = X can be any amino acid
  VARIANT 27: note = X can be any amino acid
  VARIANT 28: note = X can be any amino acid
  VARIANT 29: note = X can be any amino acid
  VARIANT 30: note = X can be any amino acid
  VARIANT 31: note = X can be any amino acid
  VARIANT 32: note = X can be any amino acid
  VARIANT 33: note = X can be any amino acid
  VARIANT 34: note = X can be any amino acid
  VARIANT 35: note = X can be any amino acid
  VARIANT 36: note = X can be any amino acid
  VARIANT 37: note = X can be any amino acid
  VARIANT 38: note = X can be any amino acid
  VARIANT 39: note = X can be any amino acid
  VARIANT 41: note = X can be any amino acid
  VARIANT 42: note = X can be any amino acid
  VARIANT 43: note = X can be any amino acid
  VARIANT 44: note = X can be any amino acid
  VARIANT 45: note = X can be any amino acid
  VARIANT 46: note = X can be any amino acid
  VARIANT 47: note = X can be any amino acid
  VARIANT 48: note = X can be any amino acid
  VARIANT 49: note = X can be any amino acid
  VARIANT 50: note = X can be any amino acid
  VARIANT 51: note = X can be any amino acid
  VARIANT 52: note = X can be any amino acid
  VARIANT 53: note = X can be any amino acid
  VARIANT 54: note = X can be any amino acid
  VARIANT 57: note = X can be any amino acid
  VARIANT 58: note = X can be any amino acid
  VARIANT 60: note = X can be any amino acid
  VARIANT 61: note = X can be any amino acid
  VARIANT 62: note = X can be any amino acid
  VARIANT 63: note = X can be any amino acid
  VARIANT 64: note = X can be any amino acid
  VARIANT 65: note = X can be any amino acid
  VARIANT 66: note = X can be any amino acid
  VARIANT 67: note = X can be any amino acid
  VARIANT 68: note = X can be any amino acid
  VARIANT 70: note = X can be any amino acid
  VARIANT 71: note = X can be any amino acid
  VARIANT 72: note = X can be any amino acid
  VARIANT 74: note = X can be any amino acid
  VARIANT 75: note = X can be any amino acid
  VARIANT 76: note = X can be any amino acid
  VARIANT 77: note = X can be any amino acid
  VARIANT 78: note = X can be any amino acid
  VARIANT 79: note = X can be any amino acid
  VARIANT 80: note = X can be any amino acid
  VARIANT 81: note = X can be any amino acid
  VARIANT 82: note = X can be any amino acid
  VARIANT 83: note = X can be any amino acid
  VARIANT 84: note = X can be any amino acid
  VARIANT 85: note = X can be any amino acid
  VARIANT 86: note = X can be any amino acid
  VARIANT 87: note = X can be any amino acid
  VARIANT 88: note = X can be any amino acid
  VARIANT 89: note = X can be any amino acid
  VARIANT 90: note = X can be any amino acid
  VARIANT 91: note = X can be any amino acid
  VARIANT 92: note = X can be any amino acid
  VARIANT 93: note = X can be any amino acid
  VARIANT 94: note = X can be any amino acid
  VARIANT 95: note = X can be any amino acid
  VARIANT 96: note = X can be any amino acid
  VARIANT 97: note = X can be any amino acid
  VARIANT 98: note = X can be any amino acid
  VARIANT 99: note = X can be any amino acid
  VARIANT 100: note = X can be any amino acid
  VARIANT 101: note = X can be any amino acid
  VARIANT 102: note = X can be any amino acid
  VARIANT 103: note = X can be any amino acid
  VARIANT 104: note = X can be any amino acid
  VARIANT 105: note = X can be any amino acid
  VARIANT 106: note = X can be any amino acid
  VARIANT 107: note = X can be any amino acid
  VARIANT 108: note = X can be any amino acid
  VARIANT 109: note = X can be any amino acid
  VARIANT 110: note = X can be any amino acid
  VARIANT 111: note = X can be any amino acid
  VARIANT 112: note = X can be any amino acid
  VARIANT 114: note = X can be any amino acid
  VARIANT 115: note = X can be any amino acid
  VARIANT 116: note = X can be any amino acid
  VARIANT 118: note = X can be any amino acid
  VARIANT 119: note = X can be any amino acid
  VARIANT 120: note = X can be any amino acid
  VARIANT 121: note = X can be any amino acid
  VARIANT 122: note = X can be any amino acid
  VARIANT 123: note = X can be any amino acid
  VARIANT 124: note = X can be any amino acid
  VARIANT 125: note = X can be any amino acid
  VARIANT 126: note = X can be any amino acid
  VARIANT 127: note = X can be any amino acid
  VARIANT 128: note = X can be any amino acid
  VARIANT 129: note = X can be any amino acid
  VARIANT 130: note = X can be any amino acid
  VARIANT 131: note = X can be any amino acid
  VARIANT 132: note = X can be any amino acid
  VARIANT 133: note = X can be any amino acid
  VARIANT 134: note = X can be any amino acid
  VARIANT 135: note = X can be any amino acid
  VARIANT 136: note = X can be any amino acid
  VARIANT 137: note = X can be any amino acid
  VARIANT 138: note = X can be any amino acid
  VARIANT 139: note = X can be any amino acid
  VARIANT 140: note = X can be any amino acid
  VARIANT 141: note = X can be any amino acid
  VARIANT 142: note = X can be any amino acid
  VARIANT 143: note = X can be any amino acid
  VARIANT 144: note = X can be any amino acid
  VARIANT 145: note = X can be any amino acid
  VARIANT 146: note = X can be any amino acid
  VARIANT 147: note = X can be any amino acid
  VARIANT 150: note = X can be any amino acid
  VARIANT 151: note = X can be any amino acid
  VARIANT 152: note = X can be any amino acid
  VARIANT 154: note = X can be any amino acid
  VARIANT 155: note = X can be any amino acid
  VARIANT 156: note = X can be any amino acid
  VARIANT 157: note = X can be any amino acid
  VARIANT 158: note = X can be any amino acid
  VARIANT 159: note = X can be any amino acid
  VARIANT 160: note = X can be any amino acid
  VARIANT 161: note = X can be any amino acid
  VARIANT 162: note = X can be any amino acid
  VARIANT 163: note = X can be any amino acid
  VARIANT 164: note = X can be any amino acid
  VARIANT 165: note = X can be any amino acid
  VARIANT 166: note = X can be any amino acid
  VARIANT 167: note = X can be any amino acid
  VARIANT 168: note = X can be any amino acid
  VARIANT 169: note = X can be any amino acid
  VARIANT 170: note = X can be any amino acid
  VARIANT 171: note = X can be any amino acid
  VARIANT 172: note = X can be any amino acid
  VARIANT 173: note = X can be any amino acid
  VARIANT 174: note = X can be any amino acid
  VARIANT 175: note = X can be any amino acid
  VARIANT 176: note = X can be any amino acid
  VARIANT 177: note = X can be any amino acid
  VARIANT 178: note = X can be any amino acid
  VARIANT 179: note = X can be any amino acid
  VARIANT 180: note = X can be any amino acid
  VARIANT 182: note = X can be any amino acid
  VARIANT 183: note = X can be any amino acid
  VARIANT 184: note = X can be any amino acid
  VARIANT 185: note = X can be any amino acid
  VARIANT 186: note = X can be any amino acid
  VARIANT 187: note = X can be any amino acid
  VARIANT 188: note = X can be any amino acid
  VARIANT 189: note = X can be any amino acid
  VARIANT 190: note = X can be any amino acid
  VARIANT 191: note = X can be any amino acid
  VARIANT 192: note = X can be any amino acid
  VARIANT 193: note = X can be any amino acid
  VARIANT 196: note = X can be any amino acid
  VARIANT 197: note = X can be any amino acid
  VARIANT 198: note = X can be any amino acid
  VARIANT 199: note = X can be any amino acid
  VARIANT 200: note = X can be any amino acid
  VARIANT 201: note = X can be any amino acid
  VARIANT 202: note = X can be any amino acid
  VARIANT 203: note = X can be any amino acid
  VARIANT 204: note = X can be any amino acid
  VARIANT 205: note = X can be any amino acid
  VARIANT 206: note = X can be any amino acid
  VARIANT 207: note = X can be any amino acid
  VARIANT 208: note = X can be any amino acid
  VARIANT 209: note = X can be any amino acid
  VARIANT 210: note = X can be any amino acid
  VARIANT 211: note = X can be any amino acid
  VARIANT 212: note = X can be any amino acid
  VARIANT 213: note = X can be any amino acid
  VARIANT 214: note = X can be any amino acid
  VARIANT 215: note = X can be any amino acid
  VARIANT 216: note = X can be any amino acid
  VARIANT 217: note = X can be any amino acid
  VARIANT 218: note = X can be any amino acid
  VARIANT 219: note = X can be any amino acid
  VARIANT 220: note = X can be any amino acid
  VARIANT 221: note = X can be any amino acid
  VARIANT 222: note = X can be any amino acid
  VARIANT 223: note = X can be any amino acid
XXXXXXXXXXXXXRXXXXXXXXLXXXXXXXXXXXXXXXXPXXXXXXXXXXXXXXNAXXHXXXXXXXXXDXXXFXXXXXXXXXXXXXXXXXXXXXXXXXXXXXXXXXXXXXXXGXXXSXXXXXXXXXXXXXXXXXXXXXXXXXXXXXXDDXXXSXXXXXXXXXXXXXXXXXXXXXXXXXXXKXXXXXXXXXXXXTGXXXXXXXXXXXXXXXXXXXXXXXXXXXX

SEQ ID NO: 19387 - protein, 230 aa, synthetic construct
  VARIANT 1: note = X can be any amino acid
  VARIANT 2: note = X can be any amino acid
  VARIANT 3: note = X can be any amino acid
  VARIANT 4: note = X can be any amino acid
  VARIANT 5: note = X can be any amino acid
  VARIANT 6: note = X can be any amino acid
  VARIANT 7: note = X can be any amino acid
  VARIANT 8: note = X can be any amino acid
  VARIANT 9: note = X can be any amino acid
  VARIANT 10: note = X can be any amino acid
  VARIANT 11: note = X can be any amino acid
  VARIANT 12: note = X can be any amino acid
  VARIANT 13: note = X can be any amino acid
  VARIANT 14: note = X can be any amino acid
  VARIANT 15: note = X can be any amino acid
  VARIANT 17: note = X can be any amino acid
  VARIANT 21: note = X can be any amino acid
  VARIANT 22: note = X can be any amino acid
  VARIANT 23: note = X can be any amino acid
  VARIANT 24: note = X can be any amino acid
  VARIANT 25: note = X can be any amino acid
  VARIANT 26: note = X can be any amino acid
  VARIANT 27: note = X can be any amino acid
  VARIANT 28: note = X can be any amino acid
  VARIANT 29: note = X can be any amino acid
  VARIANT 31: note = X can be any amino acid
  VARIANT 32: note = X can be any amino acid
  VARIANT 33: note = X can be any amino acid
  VARIANT 35: note = X can be any amino acid
  VARIANT 36: note = X can be any amino acid
  VARIANT 37: note = X can be any amino acid
  VARIANT 38: note = X can be any amino acid
  VARIANT 40: note = X can be any amino acid
  VARIANT 41: note = X can be any amino acid
  VARIANT 42: note = X can be any amino acid
  VARIANT 43: note = X can be any amino acid
  VARIANT 44: note = X can be any amino acid
  VARIANT 45: note = X can be any amino acid
  VARIANT 46: note = X can be any amino acid
  VARIANT 47: note = X can be any amino acid
  VARIANT 50: note = X can be any amino acid
  VARIANT 51: note = X can be any amino acid
  VARIANT 52: note = X can be any amino acid
  VARIANT 53: note = X can be any amino acid
  VARIANT 56: note = X can be any amino acid
  VARIANT 57: note = X can be any amino acid
  VARIANT 60: note = X can be any amino acid
  VARIANT 61: note = X can be any amino acid
  VARIANT 63: note = X can be any amino acid
  VARIANT 66: note = X can be any amino acid
  VARIANT 67: note = X can be any amino acid
  VARIANT 69: note = X can be any amino acid
  VARIANT 71: note = X can be any amino acid
  VARIANT 72: note = X can be any amino acid
  VARIANT 73: note = X can be any amino acid
  VARIANT 74: note = X can be any amino acid
  VARIANT 75: note = X can be any amino acid
  VARIANT 76: note = X can be any amino acid
  VARIANT 77: note = X can be any amino acid
  VARIANT 79: note = X can be any amino acid
  VARIANT 80: note = X can be any amino acid
  VARIANT 81: note = X can be any amino acid
  VARIANT 87: note = X can be any amino acid
  VARIANT 88: note = X can be any amino acid
  VARIANT 89: note = X can be any amino acid
  VARIANT 91: note = X can be any amino acid
  VARIANT 92: note = X can be any amino acid
  VARIANT 93: note = X can be any amino acid
  VARIANT 94: note = X can be any amino acid
  VARIANT 95: note = X can be any amino acid
  VARIANT 96: note = X can be any amino acid
  VARIANT 97: note = X can be any amino acid
  VARIANT 98: note = X can be any amino acid
  VARIANT 100: note = X can be any amino acid
  VARIANT 101: note = X can be any amino acid
  VARIANT 102: note = X can be any amino acid
  VARIANT 103: note = X can be any amino acid
  VARIANT 104: note = X can be any amino acid
  VARIANT 105: note = X can be any amino acid
  VARIANT 106: note = X can be any amino acid
  VARIANT 107: note = X can be any amino acid
  VARIANT 109: note = X can be any amino acid
  VARIANT 110: note = X can be any amino acid
  VARIANT 112: note = X can be any amino acid
  VARIANT 115: note = X can be any amino acid
  VARIANT 116: note = X can be any amino acid
  VARIANT 117: note = X can be any amino acid
  VARIANT 123: note = X can be any amino acid
  VARIANT 124: note = X can be any amino acid
  VARIANT 127: note = X can be any amino acid
  VARIANT 128: note = X can be any amino acid
  VARIANT 129: note = X can be any amino acid
  VARIANT 131: note = X can be any amino acid
  VARIANT 132: note = X can be any amino acid
  VARIANT 133: note = X can be any amino acid
  VARIANT 134: note = X can be any amino acid
  VARIANT 135: note = X can be any amino acid
  VARIANT 136: note = X can be any amino acid
  VARIANT 138: note = X can be any amino acid
  VARIANT 139: note = X can be any amino acid
  VARIANT 141: note = X can be any amino acid
  VARIANT 142: note = X can be any amino acid
  VARIANT 145: note = X can be any amino acid
  VARIANT 146: note = X can be any amino acid
  VARIANT 147: note = X can be any amino acid
  VARIANT 148: note = X can be any amino acid
  VARIANT 149: note = X can be any amino acid
  VARIANT 150: note = X can be any amino acid
  VARIANT 152: note = X can be any amino acid
  VARIANT 155: note = X can be any amino acid
  VARIANT 158: note = X can be any amino acid
  VARIANT 159: note = X can be any amino acid
  VARIANT 160: note = X can be any amino acid
  VARIANT 162: note = X can be any amino acid
  VARIANT 163: note = X can be any amino acid
  VARIANT 164: note = X can be any amino acid
  VARIANT 165: note = X can be any amino acid
  VARIANT 166: note = X can be any amino acid
  VARIANT 168: note = X can be any amino acid
  VARIANT 169: note = X can be any amino acid
  VARIANT 170: note = X can be any amino acid
  VARIANT 171: note = X can be any amino acid
  VARIANT 172: note = X can be any amino acid
  VARIANT 173: note = X can be any amino acid
  VARIANT 174: note = X can be any amino acid
  VARIANT 175: note = X can be any amino acid
  VARIANT 176: note = X can be any amino acid
  VARIANT 177: note = X can be any amino acid
  VARIANT 178: note = X can be any amino acid
  VARIANT 179: note = X can be any amino acid
  VARIANT 180: note = X can be any amino acid
  VARIANT 182: note = X can be any amino acid
  VARIANT 183: note = X can be any amino acid
  VARIANT 184: note = X can be any amino acid
  VARIANT 185: note = X can be any amino acid
  VARIANT 186: note = X can be any amino acid
  VARIANT 188: note = X can be any amino acid
  VARIANT 189: note = X can be any amino acid
  VARIANT 190: note = X can be any amino acid
  VARIANT 193: note = X can be any amino acid
  VARIANT 196: note = X can be any amino acid
  VARIANT 198: note = X can be any amino acid
  VARIANT 204: note = X can be any amino acid
  VARIANT 205: note = X can be any amino acid
  VARIANT 206: note = X can be any amino acid
  VARIANT 207: note = X can be any amino acid
  VARIANT 208: note = X can be any amino acid
  VARIANT 209: note = X can be any amino acid
  VARIANT 212: note = X can be any amino acid
  VARIANT 215: note = X can be any amino acid
  VARIANT 216: note = X can be any amino acid
  VARIANT 218: note = X can be any amino acid
  VARIANT 219: note = X can be any amino acid
  VARIANT 225: note = X can be any amino acid
  VARIANT 226: note = X can be any amino acid
  VARIANT 227: note = X can be any amino acid
  VARIANT 228: note = X can be any amino acid
  VARIANT 229: note = X can be any amino acid
  VARIANT 230: note = X can be any amino acid
XXXXXXXXXXXXXXXRXVWEXXXXXXXXXKXXXRXXXXFXXXXXXXXPHXXXXGYXXGRXXRXNAXXHXGXXXXXXXDXXXFFPSIXXXRXXXXXXXXGXXXXXXXXLXXFXTIXXXLPLGLXXSPXXXNXXXXXXDXXLXXLAXXXXXXYXRYXDDXXXSXXXXXPXXXXXXXXXXXXXFXXXXXKXXXSKXGQXHXVTGLSXXXXXXPHXPRXXKXXLRQELXXXXXX

SEQ ID NO: 19388 - protein, 221 aa, synthetic construct
  VARIANT 1: note = X can be any amino acid
  VARIANT 2: note = X can be any amino acid
  VARIANT 3: note = X can be any amino acid
  VARIANT 4: note = X can be any amino acid
  VARIANT 5: note = X can be any amino acid
  VARIANT 6: note = X can be any amino acid
  VARIANT 7: note = X can be any amino acid
  VARIANT 8: note = X can be any amino acid
  VARIANT 9: note = X can be any amino acid
  VARIANT 10: note = X can be any amino acid
  VARIANT 11: note = X can be any amino acid
  VARIANT 12: note = X can be any amino acid
  VARIANT 13: note = X can be any amino acid
  VARIANT 15: note = X can be any amino acid
  VARIANT 16: note = X can be any amino acid
  VARIANT 17: note = X can be any amino acid
  VARIANT 18: note = X can be any amino acid
  VARIANT 19: note = X can be any amino acid
  VARIANT 20: note = X can be any amino acid
  VARIANT 21: note = X can be any amino acid
  VARIANT 22: note = X can be any amino acid
  VARIANT 23: note = X can be any amino acid
  VARIANT 24: note = X can be any amino acid
  VARIANT 25: note = X can be any amino acid
  VARIANT 26: note = X can be any amino acid
  VARIANT 27: note = X can be any amino acid
  VARIANT 29: note = X can be any amino acid
  VARIANT 30: note = X can be any amino acid
  VARIANT 31: note = X can be any amino acid
  VARIANT 32: note = X can be any amino acid
  VARIANT 33: note = X can be any amino acid
  VARIANT 34: note = X can be any amino acid
  VARIANT 35: note = X can be any amino acid
  VARIANT 36: note = X can be any amino acid
  VARIANT 37: note = X can be any amino acid
  VARIANT 38: note = X can be any amino acid
  VARIANT 39: note = X can be any amino acid
  VARIANT 40: note = X can be any amino acid
  VARIANT 41: note = X can be any amino acid
  VARIANT 42: note = X can be any amino acid
  VARIANT 43: note = X can be any amino acid
  VARIANT 44: note = X can be any amino acid
  VARIANT 47: note = X can be any amino acid
  VARIANT 48: note = X can be any amino acid
  VARIANT 49: note = X can be any amino acid
  VARIANT 50: note = X can be any amino acid
  VARIANT 51: note = X can be any amino acid
  VARIANT 52: note = X can be any amino acid
  VARIANT 53: note = X can be any amino acid
  VARIANT 54: note = X can be any amino acid
  VARIANT 57: note = X can be any amino acid
  VARIANT 58: note = X can be any amino acid
  VARIANT 60: note = X can be any amino acid
  VARIANT 61: note = X can be any amino acid
  VARIANT 62: note = X can be any amino acid
  VARIANT 63: note = X can be any amino acid
  VARIANT 64: note = X can be any amino acid
  VARIANT 65: note = X can be any amino acid
  VARIANT 66: note = X can be any amino acid
  VARIANT 67: note = X can be any amino acid
  VARIANT 68: note = X can be any amino acid
  VARIANT 70: note = X can be any amino acid
  VARIANT 71: note = X can be any amino acid
  VARIANT 72: note = X can be any amino acid
  VARIANT 75: note = X can be any amino acid
  VARIANT 76: note = X can be any amino acid
  VARIANT 78: note = X can be any amino acid
  VARIANT 79: note = X can be any amino acid
  VARIANT 80: note = X can be any amino acid
  VARIANT 81: note = X can be any amino acid
  VARIANT 82: note = X can be any amino acid
  VARIANT 83: note = X can be any amino acid
  VARIANT 84: note = X can be any amino acid
  VARIANT 85: note = X can be any amino acid
  VARIANT 86: note = X can be any amino acid
  VARIANT 87: note = X can be any amino acid
  VARIANT 88: note = X can be any amino acid
  VARIANT 89: note = X can be any amino acid
  VARIANT 90: note = X can be any amino acid
  VARIANT 91: note = X can be any amino acid
  VARIANT 92: note = X can be any amino acid
  VARIANT 93: note = X can be any amino acid
  VARIANT 94: note = X can be any amino acid
  VARIANT 95: note = X can be any amino acid
  VARIANT 96: note = X can be any amino acid
  VARIANT 97: note = X can be any amino acid
  VARIANT 98: note = X can be any amino acid
  VARIANT 99: note = X can be any amino acid
  VARIANT 100: note = X can be any amino acid
  VARIANT 101: note = X can be any amino acid
  VARIANT 102: note = X can be any amino acid
  VARIANT 103: note = X can be any amino acid
  VARIANT 105: note = X can be any amino acid
  VARIANT 106: note = X can be any amino acid
  VARIANT 107: note = X can be any amino acid
  VARIANT 108: note = X can be any amino acid
  VARIANT 110: note = X can be any amino acid
  VARIANT 111: note = X can be any amino acid
  VARIANT 113: note = X can be any amino acid
  VARIANT 114: note = X can be any amino acid
  VARIANT 118: note = X can be any amino acid
  VARIANT 119: note = X can be any amino acid
  VARIANT 120: note = X can be any amino acid
  VARIANT 122: note = X can be any amino acid
  VARIANT 123: note = X can be any amino acid
  VARIANT 124: note = X can be any amino acid
  VARIANT 125: note = X can be any amino acid
  VARIANT 126: note = X can be any amino acid
  VARIANT 127: note = X can be any amino acid
  VARIANT 129: note = X can be any amino acid
  VARIANT 130: note = X can be any amino acid
  VARIANT 131: note = X can be any amino acid
  VARIANT 132: note = X can be any amino acid
  VARIANT 133: note = X can be any amino acid
  VARIANT 134: note = X can be any amino acid
  VARIANT 135: note = X can be any amino acid
  VARIANT 136: note = X can be any amino acid
  VARIANT 137: note = X can be any amino acid
  VARIANT 138: note = X can be any amino acid
  VARIANT 139: note = X can be any amino acid
  VARIANT 140: note = X can be any amino acid
  VARIANT 141: note = X can be any amino acid
  VARIANT 142: note = X can be any amino acid
  VARIANT 145: note = X can be any amino acid
  VARIANT 148: note = X can be any amino acid
  VARIANT 149: note = X can be any amino acid
  VARIANT 152: note = X can be any amino acid
  VARIANT 153: note = X can be any amino acid
  VARIANT 154: note = X can be any amino acid
  VARIANT 155: note = X can be any amino acid
  VARIANT 156: note = X can be any amino acid
  VARIANT 157: note = X can be any amino acid
  VARIANT 158: note = X can be any amino acid
  VARIANT 159: note = X can be any amino acid
  VARIANT 160: note = X can be any amino acid
  VARIANT 161: note = X can be any amino acid
  VARIANT 162: note = X can be any amino acid
  VARIANT 163: note = X can be any amino acid
  VARIANT 164: note = X can be any amino acid
  VARIANT 165: note = X can be any amino acid
  VARIANT 166: note = X can be any amino acid
  VARIANT 167: note = X can be any amino acid
  VARIANT 168: note = X can be any amino acid
  VARIANT 169: note = X can be any amino acid
  VARIANT 170: note = X can be any amino acid
  VARIANT 171: note = X can be any amino acid
  VARIANT 172: note = X can be any amino acid
  VARIANT 173: note = X can be any amino acid
  VARIANT 174: note = X can be any amino acid
  VARIANT 175: note = X can be any amino acid
  VARIANT 177: note = X can be any amino acid
  VARIANT 178: note = X can be any amino acid
  VARIANT 180: note = X can be any amino acid
  VARIANT 181: note = X can be any amino acid
  VARIANT 182: note = X can be any amino acid
  VARIANT 183: note = X can be any amino acid
  VARIANT 184: note = X can be any amino acid
  VARIANT 185: note = X can be any amino acid
  VARIANT 187: note = X can be any amino acid
  VARIANT 188: note = X can be any amino acid
  VARIANT 190: note = X can be any amino acid
  VARIANT 195: note = X can be any amino acid
  VARIANT 196: note = X can be any amino acid
  VARIANT 197: note = X can be any amino acid
  VARIANT 198: note = X can be any amino acid
  VARIANT 199: note = X can be any amino acid
  VARIANT 200: note = X can be any amino acid
  VARIANT 201: note = X can be any amino acid
  VARIANT 204: note = X can be any amino acid
  VARIANT 205: note = X can be any amino acid
  VARIANT 206: note = X can be any amino acid
  VARIANT 207: note = X can be any amino acid
  VARIANT 208: note = X can be any amino acid
  VARIANT 210: note = X can be any amino acid
  VARIANT 211: note = X can be any amino acid
  VARIANT 212: note = X can be any amino acid
  VARIANT 214: note = X can be any amino acid
  VARIANT 215: note = X can be any amino acid
  VARIANT 216: note = X can be any amino acid
  VARIANT 217: note = X can be any amino acid
  VARIANT 218: note = X can be any amino acid
  VARIANT 219: note = X can be any amino acid
  VARIANT 220: note = X can be any amino acid
  VARIANT 221: note = X can be any amino acid
XXXXXXXXXXXXXRXXXXXXXXXXXXXKXXXXXXXXXXXXXXXXGFXXXXXXXXNAXXHXXXXXXXXXDXXXFFXXIXXXXXXXXXXXXXXXXXXXXXXXXXXTXXXXLXXGXXTSPXXXNXXXXXXDXXXXXXXXXXXXXXRYXDDXXFSXXXXXXXXXXXXXXXXXXXXXXXXNXXKXXXXXXGXXQXVTGLXXXXXXXPRXXXXXKXXXRXXXXXXXX

SEQ ID NO: 19389 - protein, 226 aa, synthetic construct
  VARIANT 2: note = X can be any amino acid
  VARIANT 3: note = X can be any amino acid
  VARIANT 4: note = X can be any amino acid
  VARIANT 5: note = X can be any amino acid
  VARIANT 6: note = X can be any amino acid
  VARIANT 7: note = X can be any amino acid
  VARIANT 10: note = X can be any amino acid
  VARIANT 11: note = X can be any amino acid
  VARIANT 12: note = X can be any amino acid
  VARIANT 13: note = X can be any amino acid
  VARIANT 14: note = X can be any amino acid
  VARIANT 17: note = X can be any amino acid
  VARIANT 19: note = X can be any amino acid
  VARIANT 21: note = X can be any amino acid
  VARIANT 22: note = X can be any amino acid
  VARIANT 24: note = X can be any amino acid
  VARIANT 25: note = X can be any amino acid
  VARIANT 26: note = X can be any amino acid
  VARIANT 27: note = X can be any amino acid
  VARIANT 28: note = X can be any amino acid
  VARIANT 29: note = X can be any amino acid
  VARIANT 30: note = X can be any amino acid
  VARIANT 31: note = X can be any amino acid
  VARIANT 34: note = X can be any amino acid
  VARIANT 35: note = X can be any amino acid
  VARIANT 36: note = X can be any amino acid
  VARIANT 37: note = X can be any amino acid
  VARIANT 38: note = X can be any amino acid
  VARIANT 39: note = X can be any amino acid
  VARIANT 40: note = X can be any amino acid
  VARIANT 41: note = X can be any amino acid
  VARIANT 42: note = X can be any amino acid
  VARIANT 43: note = X can be any amino acid
  VARIANT 44: note = X can be any amino acid
  VARIANT 47: note = X can be any amino acid
  VARIANT 53: note = X can be any amino acid
  VARIANT 54: note = X can be any amino acid
  VARIANT 55: note = X can be any amino acid
  VARIANT 58: note = X can be any amino acid
  VARIANT 59: note = X can be any amino acid
  VARIANT 60: note = X can be any amino acid
  VARIANT 63: note = X can be any amino acid
  VARIANT 64: note = X can be any amino acid
  VARIANT 66: note = X can be any amino acid
  VARIANT 67: note = X can be any amino acid
  VARIANT 68: note = X can be any amino acid
  VARIANT 69: note = X can be any amino acid
  VARIANT 70: note = X can be any amino acid
  VARIANT 71: note = X can be any amino acid
  VARIANT 72: note = X can be any amino acid
  VARIANT 77: note = X can be any amino acid
  VARIANT 78: note = X can be any amino acid
  VARIANT 81: note = X can be any amino acid
  VARIANT 82: note = X can be any amino acid
  VARIANT 85: note = X can be any amino acid
  VARIANT 86: note = X can be any amino acid
  VARIANT 89: note = X can be any amino acid
  VARIANT 90: note = X can be any amino acid
  VARIANT 91: note = X can be any amino acid
  VARIANT 92: note = X can be any amino acid
  VARIANT 93: note = X can be any amino acid
  VARIANT 94: note = X can be any amino acid
  VARIANT 95: note = X can be any amino acid
  VARIANT 96: note = X can be any amino acid
  VARIANT 97: note = X can be any amino acid
  VARIANT 98: note = X can be any amino acid
  VARIANT 99: note = X can be any amino acid
  VARIANT 100: note = X can be any amino acid
  VARIANT 101: note = X can be any amino acid
  VARIANT 103: note = X can be any amino acid
  VARIANT 104: note = X can be any amino acid
  VARIANT 105: note = X can be any amino acid
  VARIANT 107: note = X can be any amino acid
  VARIANT 108: note = X can be any amino acid
  VARIANT 114: note = X can be any amino acid
  VARIANT 116: note = X can be any amino acid
  VARIANT 124: note = X can be any amino acid
  VARIANT 125: note = X can be any amino acid
  VARIANT 126: note = X can be any amino acid
  VARIANT 128: note = X can be any amino acid
  VARIANT 131: note = X can be any amino acid
  VARIANT 132: note = X can be any amino acid
  VARIANT 133: note = X can be any amino acid
  VARIANT 135: note = X can be any amino acid
  VARIANT 136: note = X can be any amino acid
  VARIANT 137: note = X can be any amino acid
  VARIANT 139: note = X can be any amino acid
  VARIANT 142: note = X can be any amino acid
  VARIANT 143: note = X can be any amino acid
  VARIANT 144: note = X can be any amino acid
  VARIANT 145: note = X can be any amino acid
  VARIANT 146: note = X can be any amino acid
  VARIANT 147: note = X can be any amino acid
  VARIANT 148: note = X can be any amino acid
  VARIANT 149: note = X can be any amino acid
  VARIANT 154: note = X can be any amino acid
  VARIANT 155: note = X can be any amino acid
  VARIANT 160: note = X can be any amino acid
  VARIANT 161: note = X can be any amino acid
  VARIANT 162: note = X can be any amino acid
  VARIANT 163: note = X can be any amino acid
  VARIANT 164: note = X can be any amino acid
  VARIANT 165: note = X can be any amino acid
  VARIANT 166: note = X can be any amino acid
  VARIANT 167: note = X can be any amino acid
  VARIANT 168: note = X can be any amino acid
  VARIANT 169: note = X can be any amino acid
  VARIANT 170: note = X can be any amino acid
  VARIANT 171: note = X can be any amino acid
  VARIANT 172: note = X can be any amino acid
  VARIANT 173: note = X can be any amino acid
  VARIANT 174: note = X can be any amino acid
  VARIANT 175: note = X can be any amino acid
  VARIANT 178: note = X can be any amino acid
  VARIANT 181: note = X can be any amino acid
  VARIANT 182: note = X can be any amino acid
  VARIANT 183: note = X can be any amino acid
  VARIANT 186: note = X can be any amino acid
  VARIANT 188: note = X can be any amino acid
  VARIANT 189: note = X can be any amino acid
  VARIANT 191: note = X can be any amino acid
  VARIANT 192: note = X can be any amino acid
  VARIANT 194: note = X can be any amino acid
  VARIANT 199: note = X can be any amino acid
  VARIANT 201: note = X can be any amino acid
  VARIANT 203: note = X can be any amino acid
  VARIANT 204: note = X can be any amino acid
  VARIANT 205: note = X can be any amino acid
  VARIANT 211: note = X can be any amino acid
  VARIANT 212: note = X can be any amino acid
  VARIANT 214: note = X can be any amino acid
  VARIANT 215: note = X can be any amino acid
  VARIANT 219: note = X can be any amino acid
  VARIANT 220: note = X can be any amino acid
  VARIANT 221: note = X can be any amino acid
  VARIANT 222: note = X can be any amino acid
  VARIANT 223: note = X can be any amino acid
  VARIANT 224: note = X can be any amino acid
  VARIANT 226: note = X can be any amino acid
YXXXXXXKRXXXXXGEXRXVXXAXXXXXXXXHRXXXXXXXXXXXFGXHVQGFXXXRSXXXNAXXHXXXXXXXHADIXXFFXXITXXQVXXXXXXXXXXXXXAXXXAXXCTIDGXLXQGTRCSPXXXNXVCXXXDXXXLXLAXXXXXXXXRYADXXTFSGXXXXXXXXXXXXXXXXGFXLRXXXCYXQXXGXXQXVTGLXVXDXXXPRLPKXXKXXLRLXXXXXXKX

SEQ ID NO: 19390 - protein, 223 aa, synthetic construct
  VARIANT 3: note = X can be any amino acid
  VARIANT 5: note = X can be any amino acid
  VARIANT 7: note = X can be any amino acid
  VARIANT 8: note = X can be any amino acid
  VARIANT 9: note = X can be any amino acid
  VARIANT 10: note = X can be any amino acid
  VARIANT 11: note = X can be any amino acid
  VARIANT 12: note = X can be any amino acid
  VARIANT 13: note = X can be any amino acid
  VARIANT 15: note = X can be any amino acid
  VARIANT 17: note = X can be any amino acid
  VARIANT 20: note = X can be any amino acid
  VARIANT 22: note = X can be any amino acid
  VARIANT 25: note = X can be any amino acid
  VARIANT 26: note = X can be any amino acid
  VARIANT 28: note = X can be any amino acid
  VARIANT 30: note = X can be any amino acid
  VARIANT 31: note = X can be any amino acid
  VARIANT 32: note = X can be any amino acid
  VARIANT 33: note = X can be any amino acid
  VARIANT 34: note = X can be any amino acid
  VARIANT 35: note = X can be any amino acid
  VARIANT 36: note = X can be any amino acid
  VARIANT 37: note = X can be any amino acid
  VARIANT 38: note = X can be any amino acid
  VARIANT 39: note = X can be any amino acid
  VARIANT 40: note = X can be any amino acid
  VARIANT 41: note = X can be any amino acid
  VARIANT 42: note = X can be any amino acid
  VARIANT 43: note = X can be any amino acid
  VARIANT 45: note = X can be any amino acid
  VARIANT 48: note = X can be any amino acid
  VARIANT 49: note = X can be any amino acid
  VARIANT 51: note = X can be any amino acid
  VARIANT 52: note = X can be any amino acid
  VARIANT 53: note = X can be any amino acid
  VARIANT 54: note = X can be any amino acid
  VARIANT 55: note = X can be any amino acid
  VARIANT 58: note = X can be any amino acid
  VARIANT 59: note = X can be any amino acid
  VARIANT 61: note = X can be any amino acid
  VARIANT 62: note = X can be any amino acid
  VARIANT 64: note = X can be any amino acid
  VARIANT 66: note = X can be any amino acid
  VARIANT 67: note = X can be any amino acid
  VARIANT 69: note = X can be any amino acid
  VARIANT 71: note = X can be any amino acid
  VARIANT 72: note = X can be any amino acid
  VARIANT 73: note = X can be any amino acid
  VARIANT 76: note = X can be any amino acid
  VARIANT 77: note = X can be any amino acid
  VARIANT 78: note = X can be any amino acid
  VARIANT 79: note = X can be any amino acid
  VARIANT 80: note = X can be any amino acid
  VARIANT 81: note = X can be any amino acid
  VARIANT 82: note = X can be any amino acid
  VARIANT 83: note = X can be any amino acid
  VARIANT 84: note = X can be any amino acid
  VARIANT 85: note = X can be any amino acid
  VARIANT 86: note = X can be any amino acid
  VARIANT 88: note = X can be any amino acid
  VARIANT 89: note = X can be any amino acid
  VARIANT 90: note = X can be any amino acid
  VARIANT 93: note = X can be any amino acid
  VARIANT 94: note = X can be any amino acid
  VARIANT 95: note = X can be any amino acid
  VARIANT 96: note = X can be any amino acid
  VARIANT 97: note = X can be any amino acid
  VARIANT 98: note = X can be any amino acid
  VARIANT 99: note = X can be any amino acid
  VARIANT 100: note = X can be any amino acid
  VARIANT 101: note = X can be any amino acid
  VARIANT 102: note = X can be any amino acid
  VARIANT 103: note = X can be any amino acid
  VARIANT 104: note = X can be any amino acid
  VARIANT 105: note = X can be any amino acid
  VARIANT 106: note = X can be any amino acid
  VARIANT 107: note = X can be any amino acid
  VARIANT 108: note = X can be any amino acid
  VARIANT 109: note = X can be any amino acid
  VARIANT 111: note = X can be any amino acid
  VARIANT 114: note = X can be any amino acid
  VARIANT 116: note = X can be any amino acid
  VARIANT 119: note = X can be any amino acid
  VARIANT 120: note = X can be any amino acid
  VARIANT 123: note = X can be any amino acid
  VARIANT 124: note = X can be any amino acid
  VARIANT 125: note = X can be any amino acid
  VARIANT 126: note = X can be any amino acid
  VARIANT 127: note = X can be any amino acid
  VARIANT 128: note = X can be any amino acid
  VARIANT 130: note = X can be any amino acid
  VARIANT 131: note = X can be any amino acid
  VARIANT 132: note = X can be any amino acid
  VARIANT 133: note = X can be any amino acid
  VARIANT 134: note = X can be any amino acid
  VARIANT 135: note = X can be any amino acid
  VARIANT 136: note = X can be any amino acid
  VARIANT 137: note = X can be any amino acid
  VARIANT 138: note = X can be any amino acid
  VARIANT 139: note = X can be any amino acid
  VARIANT 140: note = X can be any amino acid
  VARIANT 141: note = X can be any amino acid
  VARIANT 142: note = X can be any amino acid
  VARIANT 143: note = X can be any amino acid
  VARIANT 144: note = X can be any amino acid
  VARIANT 150: note = X can be any amino acid
  VARIANT 151: note = X can be any amino acid
  VARIANT 155: note = X can be any amino acid
  VARIANT 156: note = X can be any amino acid
  VARIANT 157: note = X can be any amino acid
  VARIANT 158: note = X can be any amino acid
  VARIANT 159: note = X can be any amino acid
  VARIANT 160: note = X can be any amino acid
  VARIANT 161: note = X can be any amino acid
  VARIANT 162: note = X can be any amino acid
  VARIANT 163: note = X can be any amino acid
  VARIANT 164: note = X can be any amino acid
  VARIANT 165: note = X can be any amino acid
  VARIANT 166: note = X can be any amino acid
  VARIANT 167: note = X can be any amino acid
  VARIANT 168: note = X can be any amino acid
  VARIANT 169: note = X can be any amino acid
  VARIANT 170: note = X can be any amino acid
  VARIANT 171: note = X can be any amino acid
  VARIANT 172: note = X can be any amino acid
  VARIANT 173: note = X can be any amino acid
  VARIANT 174: note = X can be any amino acid
  VARIANT 176: note = X can be any amino acid
  VARIANT 177: note = X can be any amino acid
  VARIANT 178: note = X can be any amino acid
  VARIANT 179: note = X can be any amino acid
  VARIANT 180: note = X can be any amino acid
  VARIANT 182: note = X can be any amino acid
  VARIANT 183: note = X can be any amino acid
  VARIANT 184: note = X can be any amino acid
  VARIANT 185: note = X can be any amino acid
  VARIANT 186: note = X can be any amino acid
  VARIANT 187: note = X can be any amino acid
  VARIANT 189: note = X can be any amino acid
  VARIANT 199: note = X can be any amino acid
  VARIANT 200: note = X can be any amino acid
  VARIANT 201: note = X can be any amino acid
  VARIANT 202: note = X can be any amino acid
  VARIANT 203: note = X can be any amino acid
  VARIANT 204: note = X can be any amino acid
  VARIANT 212: note = X can be any amino acid
  VARIANT 213: note = X can be any amino acid
  VARIANT 216: note = X can be any amino acid
  VARIANT 217: note = X can be any amino acid
  VARIANT 219: note = X can be any amino acid
  VARIANT 220: note = X can be any amino acid
  VARIANT 221: note = X can be any amino acid
  VARIANT 222: note = X can be any amino acid
  VARIANT 223: note = X can be any amino acid
YRXFXIXXXXXXXRXIXAPXVXLKXXQXWXXXXXXXXXXXXXXVXGFXXGXXXXXAAXXHXXAXWXXSXDXXXFFXXXXXXXXXXXLXXXGYXXXXXXXXXXXXXXXXXLXQGXPXSPXXSNXXXXXXDXXXXXXXXXXXXXXXRYADDXXFSGXXXXXXXXXXXXXXXXXXXXWXXXXXKXXXXXXPXRLKVHGLLVXXXXXXLTKGYRNXXRAXXHXXXXX

SEQ ID NO: 19391 - protein, 225 aa, synthetic construct
  VARIANT 2: note = X can be any amino acid
  VARIANT 3: note = X can be any amino acid
  VARIANT 4: note = X can be any amino acid
  VARIANT 6: note = X can be any amino acid
  VARIANT 7: note = X can be any amino acid
  VARIANT 8: note = X can be any amino acid
  VARIANT 9: note = X can be any amino acid
  VARIANT 10: note = X can be any amino acid
  VARIANT 11: note = X can be any amino acid
  VARIANT 12: note = X can be any amino acid
  VARIANT 13: note = X can be any amino acid
  VARIANT 20: note = X can be any amino acid
  VARIANT 21: note = X can be any amino acid
  VARIANT 22: note = X can be any amino acid
  VARIANT 25: note = X can be any amino acid
  VARIANT 26: note = X can be any amino acid
  VARIANT 29: note = X can be any amino acid
  VARIANT 30: note = X can be any amino acid
  VARIANT 32: note = X can be any amino acid
  VARIANT 33: note = X can be any amino acid
  VARIANT 34: note = X can be any amino acid
  VARIANT 35: note = X can be any amino acid
  VARIANT 37: note = X can be any amino acid
  VARIANT 38: note = X can be any amino acid
  VARIANT 39: note = X can be any amino acid
  VARIANT 40: note = X can be any amino acid
  VARIANT 41: note = X can be any amino acid
  VARIANT 42: note = X can be any amino acid
  VARIANT 43: note = X can be any amino acid
  VARIANT 48: note = X can be any amino acid
  VARIANT 49: note = X can be any amino acid
  VARIANT 54: note = X can be any amino acid
  VARIANT 55: note = X can be any amino acid
  VARIANT 58: note = X can be any amino acid
  VARIANT 59: note = X can be any amino acid
  VARIANT 61: note = X can be any amino acid
  VARIANT 63: note = X can be any amino acid
  VARIANT 64: note = X can be any amino acid
  VARIANT 65: note = X can be any amino acid
  VARIANT 68: note = X can be any amino acid
  VARIANT 69: note = X can be any amino acid
  VARIANT 71: note = X can be any amino acid
  VARIANT 72: note = X can be any amino acid
  VARIANT 73: note = X can be any amino acid
  VARIANT 77: note = X can be any amino acid
  VARIANT 78: note = X can be any amino acid
  VARIANT 79: note = X can be any amino acid
  VARIANT 80: note = X can be any amino acid
  VARIANT 81: note = X can be any amino acid
  VARIANT 82: note = X can be any amino acid
  VARIANT 83: note = X can be any amino acid
  VARIANT 84: note = X can be any amino acid
  VARIANT 85: note = X can be any amino acid
  VARIANT 86: note = X can be any amino acid
  VARIANT 87: note = X can be any amino acid
  VARIANT 88: note = X can be any amino acid
  VARIANT 89: note = X can be any amino acid
  VARIANT 90: note = X can be any amino acid
  VARIANT 91: note = X can be any amino acid
  VARIANT 92: note = X can be any amino acid
  VARIANT 93: note = X can be any amino acid
  VARIANT 94: note = X can be any amino acid
  VARIANT 95: note = X can be any amino acid
  VARIANT 96: note = X can be any amino acid
  VARIANT 97: note = X can be any amino acid
  VARIANT 98: note = X can be any amino acid
  VARIANT 99: note = X can be any amino acid
  VARIANT 100: note = X can be any amino acid
  VARIANT 101: note = X can be any amino acid
  VARIANT 102: note = X can be any amino acid
  VARIANT 104: note = X can be any amino acid
  VARIANT 105: note = X can be any amino acid
  VARIANT 106: note = X can be any amino acid
  VARIANT 107: note = X can be any amino acid
  VARIANT 108: note = X can be any amino acid
  VARIANT 109: note = X can be any amino acid
  VARIANT 119: note = X can be any amino acid
  VARIANT 121: note = X can be any amino acid
  VARIANT 125: note = X can be any amino acid
  VARIANT 126: note = X can be any amino acid
  VARIANT 127: note = X can be any amino acid
  VARIANT 128: note = X can be any amino acid
  VARIANT 130: note = X can be any amino acid
  VARIANT 131: note = X can be any amino acid
  VARIANT 133: note = X can be any amino acid
  VARIANT 134: note = X can be any amino acid
  VARIANT 135: note = X can be any amino acid
  VARIANT 137: note = X can be any amino acid
  VARIANT 138: note = X can be any amino acid
  VARIANT 139: note = X can be any amino acid
  VARIANT 140: note = X can be any amino acid
  VARIANT 141: note = X can be any amino acid
  VARIANT 142: note = X can be any amino acid
  VARIANT 151: note = X can be any amino acid
  VARIANT 154: note = X can be any amino acid
  VARIANT 155: note = X can be any amino acid
  VARIANT 156: note = X can be any amino acid
  VARIANT 157: note = X can be any amino acid
  VARIANT 158: note = X can be any amino acid
  VARIANT 159: note = X can be any amino acid
  VARIANT 160: note = X can be any amino acid
  VARIANT 161: note = X can be any amino acid
  VARIANT 162: note = X can be any amino acid
  VARIANT 163: note = X can be any amino acid
  VARIANT 164: note = X can be any amino acid
  VARIANT 165: note = X can be any amino acid
  VARIANT 166: note = X can be any amino acid
  VARIANT 167: note = X can be any amino acid
  VARIANT 168: note = X can be any amino acid
  VARIANT 169: note = X can be any amino acid
  VARIANT 170: note = X can be any amino acid
  VARIANT 171: note = X can be any amino acid
  VARIANT 173: note = X can be any amino acid
  VARIANT 174: note = X can be any amino acid
  VARIANT 175: note = X can be any amino acid
  VARIANT 176: note = X can be any amino acid
  VARIANT 178: note = X can be any amino acid
  VARIANT 179: note = X can be any amino acid
  VARIANT 180: note = X can be any amino acid
  VARIANT 181: note = X can be any amino acid
  VARIANT 182: note = X can be any amino acid
  VARIANT 183: note = X can be any amino acid
  VARIANT 185: note = X can be any amino acid
  VARIANT 186: note = X can be any amino acid
  VARIANT 187: note = X can be any amino acid
  VARIANT 188: note = X can be any amino acid
  VARIANT 189: note = X can be any amino acid
  VARIANT 190: note = X can be any amino acid
  VARIANT 191: note = X can be any amino acid
  VARIANT 195: note = X can be any amino acid
  VARIANT 199: note = X can be any amino acid
  VARIANT 203: note = X can be any amino acid
  VARIANT 204: note = X can be any amino acid
  VARIANT 205: note = X can be any amino acid
  VARIANT 206: note = X can be any amino acid
  VARIANT 209: note = X can be any amino acid
  VARIANT 210: note = X can be any amino acid
  VARIANT 211: note = X can be any amino acid
  VARIANT 214: note = X can be any amino acid
  VARIANT 218: note = X can be any amino acid
  VARIANT 219: note = X can be any amino acid
  VARIANT 220: note = X can be any amino acid
  VARIANT 221: note = X can be any amino acid
  VARIANT 222: note = X can be any amino acid
  VARIANT 223: note = X can be any amino acid
  VARIANT 224: note = X can be any amino acid
  VARIANT 225: note = X can be any amino acid
YXXXPXXXXXXXXRWIEAPXXXLKXXQRXXLXXXXYXXXXXXXAHGFXXGRSIXXNAXXHXGXXXVVXXDXXXFFPXXXXXXXXXXXXXXXXXXXXXXXXXXLXXXXXXLPQGAPTSPXLXNLVXXXXDXXLXXXAXXXXXXYTRYADDLXFSXXXXXXXXXXXXXXXXXXIXXXXGXXXXXXKXXXXXXXQRQXVTGXVVNXXXXLPXXXRRXLRAXXXXXXXX

SEQ ID NO: 19392 - protein, 236 aa, synthetic construct
  VARIANT 2: note = X can be any amino acid
  VARIANT 3: note = X can be any amino acid
  VARIANT 5: note = X can be any amino acid
  VARIANT 7: note = X can be any amino acid
  VARIANT 9: note = X can be any amino acid
  VARIANT 10: note = X can be any amino acid
  VARIANT 12: note = X can be any amino acid
  VARIANT 13: note = X can be any amino acid
  VARIANT 15: note = X can be any amino acid
  VARIANT 17: note = X can be any amino acid
  VARIANT 18: note = X can be any amino acid
  VARIANT 20: note = X can be any amino acid
  VARIANT 21: note = X can be any amino acid
  VARIANT 22: note = X can be any amino acid
  VARIANT 25: note = X can be any amino acid
  VARIANT 26: note = X can be any amino acid
  VARIANT 28: note = X can be any amino acid
  VARIANT 29: note = X can be any amino acid
  VARIANT 30: note = X can be any amino acid
  VARIANT 31: note = X can be any amino acid
  VARIANT 32: note = X can be any amino acid
  VARIANT 33: note = X can be any amino acid
  VARIANT 35: note = X can be any amino acid
  VARIANT 36: note = X can be any amino acid
  VARIANT 37: note = X can be any amino acid
  VARIANT 38: note = X can be any amino acid
  VARIANT 39: note = X can be any amino acid
  VARIANT 40: note = X can be any amino acid
  VARIANT 41: note = X can be any amino acid
  VARIANT 42: note = X can be any amino acid
  VARIANT 43: note = X can be any amino acid
  VARIANT 44: note = X can be any amino acid
  VARIANT 45: note = X can be any amino acid
  VARIANT 48: note = X can be any amino acid
  VARIANT 49: note = X can be any amino acid
  VARIANT 50: note = X can be any amino acid
  VARIANT 51: note = X can be any amino acid
  VARIANT 53: note = X can be any amino acid
  VARIANT 54: note = X can be any amino acid
  VARIANT 55: note = X can be any amino acid
  VARIANT 58: note = X can be any amino acid
  VARIANT 59: note = X can be any amino acid
  VARIANT 61: note = X can be any amino acid
  VARIANT 62: note = X can be any amino acid
  VARIANT 63: note = X can be any amino acid
  VARIANT 64: note = X can be any amino acid
  VARIANT 65: note = X can be any amino acid
  VARIANT 66: note = X can be any amino acid
  VARIANT 67: note = X can be any amino acid
  VARIANT 69: note = X can be any amino acid
  VARIANT 72: note = X can be any amino acid
  VARIANT 73: note = X can be any amino acid
  VARIANT 76: note = X can be any amino acid
  VARIANT 77: note = X can be any amino acid
  VARIANT 79: note = X can be any amino acid
  VARIANT 80: note = X can be any amino acid
  VARIANT 81: note = X can be any amino acid
  VARIANT 83: note = X can be any amino acid
  VARIANT 84: note = X can be any amino acid
  VARIANT 85: note = X can be any amino acid
  VARIANT 86: note = X can be any amino acid
  VARIANT 87: note = X can be any amino acid
  VARIANT 88: note = X can be any amino acid
  VARIANT 89: note = X can be any amino acid
  VARIANT 90: note = X can be any amino acid
  VARIANT 91: note = X can be any amino acid
  VARIANT 92: note = X can be any amino acid
  VARIANT 93: note = X can be any amino acid
  VARIANT 94: note = X can be any amino acid
  VARIANT 95: note = X can be any amino acid
  VARIANT 96: note = X can be any amino acid
  VARIANT 97: note = X can be any amino acid
  VARIANT 98: note = X can be any amino acid
  VARIANT 100: note = X can be any amino acid
  VARIANT 101: note = X can be any amino acid
  VARIANT 102: note = X can be any amino acid
  VARIANT 104: note = X can be any amino acid
  VARIANT 105: note = X can be any amino acid
  VARIANT 106: note = X can be any amino acid
  VARIANT 107: note = X can be any amino acid
  VARIANT 108: note = X can be any amino acid
  VARIANT 109: note = X can be any amino acid
  VARIANT 110: note = X can be any amino acid
  VARIANT 111: note = X can be any amino acid
  VARIANT 118: note = X can be any amino acid
  VARIANT 121: note = X can be any amino acid
  VARIANT 122: note = X can be any amino acid
  VARIANT 125: note = X can be any amino acid
  VARIANT 126: note = X can be any amino acid
  VARIANT 127: note = X can be any amino acid
  VARIANT 128: note = X can be any amino acid
  VARIANT 129: note = X can be any amino acid
  VARIANT 130: note = X can be any amino acid
  VARIANT 132: note = X can be any amino acid
  VARIANT 133: note = X can be any amino acid
  VARIANT 135: note = X can be any amino acid
  VARIANT 136: note = X can be any amino acid
  VARIANT 137: note = X can be any amino acid
  VARIANT 139: note = X can be any amino acid
  VARIANT 140: note = X can be any amino acid
  VARIANT 141: note = X can be any amino acid
  VARIANT 142: note = X can be any amino acid
  VARIANT 143: note = X can be any amino acid
  VARIANT 144: note = X can be any amino acid
  VARIANT 152: note = X can be any amino acid
  VARIANT 154: note = X can be any amino acid
  VARIANT 156: note = X can be any amino acid
  VARIANT 157: note = X can be any amino acid
  VARIANT 158: note = X can be any amino acid
  VARIANT 159: note = X can be any amino acid
  VARIANT 160: note = X can be any amino acid
  VARIANT 161: note = X can be any amino acid
  VARIANT 162: note = X can be any amino acid
  VARIANT 163: note = X can be any amino acid
  VARIANT 164: note = X can be any amino acid
  VARIANT 165: note = X can be any amino acid
  VARIANT 166: note = X can be any amino acid
  VARIANT 167: note = X can be any amino acid
  VARIANT 168: note = X can be any amino acid
  VARIANT 169: note = X can be any amino acid
  VARIANT 170: note = X can be any amino acid
  VARIANT 171: note = X can be any amino acid
  VARIANT 172: note = X can be any amino acid
  VARIANT 173: note = X can be any amino acid
  VARIANT 174: note = X can be any amino acid
  VARIANT 175: note = X can be any amino acid
  VARIANT 176: note = X can be any amino acid
  VARIANT 177: note = X can be any amino acid
  VARIANT 178: note = X can be any amino acid
  VARIANT 179: note = X can be any amino acid
  VARIANT 180: note = X can be any amino acid
  VARIANT 181: note = X can be any amino acid
  VARIANT 182: note = X can be any amino acid
  VARIANT 183: note = X can be any amino acid
  VARIANT 184: note = X can be any amino acid
  VARIANT 185: note = X can be any amino acid
  VARIANT 186: note = X can be any amino acid
  VARIANT 187: note = X can be any amino acid
  VARIANT 188: note = X can be any amino acid
  VARIANT 190: note = X can be any amino acid
  VARIANT 191: note = X can be any amino acid
  VARIANT 193: note = X can be any amino acid
  VARIANT 194: note = X can be any amino acid
  VARIANT 196: note = X can be any amino acid
  VARIANT 197: note = X can be any amino acid
  VARIANT 198: note = X can be any amino acid
  VARIANT 199: note = X can be any amino acid
  VARIANT 200: note = X can be any amino acid
  VARIANT 201: note = X can be any amino acid
  VARIANT 202: note = X can be any amino acid
  VARIANT 203: note = X can be any amino acid
  VARIANT 204: note = X can be any amino acid
  VARIANT 205: note = X can be any amino acid
  VARIANT 206: note = X can be any amino acid
  VARIANT 210: note = X can be any amino acid
  VARIANT 211: note = X can be any amino acid
  VARIANT 212: note = X can be any amino acid
  VARIANT 214: note = X can be any amino acid
  VARIANT 215: note = X can be any amino acid
  VARIANT 216: note = X can be any amino acid
  VARIANT 218: note = X can be any amino acid
  VARIANT 219: note = X can be any amino acid
  VARIANT 221: note = X can be any amino acid
  VARIANT 222: note = X can be any amino acid
  VARIANT 223: note = X can be any amino acid
  VARIANT 224: note = X can be any amino acid
  VARIANT 225: note = X can be any amino acid
  VARIANT 226: note = X can be any amino acid
  VARIANT 227: note = X can be any amino acid
  VARIANT 228: note = X can be any amino acid
  VARIANT 229: note = X can be any amino acid
  VARIANT 230: note = X can be any amino acid
  VARIANT 231: note = X can be any amino acid
  VARIANT 232: note = X can be any amino acid
  VARIANT 233: note = X can be any amino acid
  VARIANT 234: note = X can be any amino acid
  VARIANT 235: note = X can be any amino acid
  VARIANT 236: note = X can be any amino acid
YXXFXIXKXXGXXRXIXXPXXXLKXXQXXXXXXLXXXXXXXXXXXGFXXXXSXXXNAXXHXXXXXXXNXDLXXFFXXIXXXRXXXXXXXXXXXXXXXXAXXXAXXXXXXXXLPQGAPXSPXXSNXXXXXXDXXLXXXAXXXXXXYTRYADDXTXSXXXXXXXXXXXXXXXXXXXXXXXXXXXXXXXXXFXXNXXKXXXXXXXXXXXVTGXXXNXXXNXXRXXXXXXXXXXXXXXXX

SEQ ID NO: 19393 - protein, 243 aa, synthetic construct
  VARIANT 2: note = X can be any amino acid
  VARIANT 3: note = X can be any amino acid
  VARIANT 5: note = X can be any amino acid
  VARIANT 6: note = X can be any amino acid
  VARIANT 7: note = X can be any amino acid
  VARIANT 9: note = X can be any amino acid
  VARIANT 10: note = X can be any amino acid
  VARIANT 13: note = X can be any amino acid
  VARIANT 15: note = X can be any amino acid
  VARIANT 17: note = X can be any amino acid
  VARIANT 20: note = X can be any amino acid
  VARIANT 21: note = X can be any amino acid
  VARIANT 22: note = X can be any amino acid
  VARIANT 24: note = X can be any amino acid
  VARIANT 25: note = X can be any amino acid
  VARIANT 26: note = X can be any amino acid
  VARIANT 28: note = X can be any amino acid
  VARIANT 29: note = X can be any amino acid
  VARIANT 30: note = X can be any amino acid
  VARIANT 31: note = X can be any amino acid
  VARIANT 32: note = X can be any amino acid
  VARIANT 33: note = X can be any amino acid
  VARIANT 34: note = X can be any amino acid
  VARIANT 35: note = X can be any amino acid
  VARIANT 36: note = X can be any amino acid
  VARIANT 37: note = X can be any amino acid
  VARIANT 38: note = X can be any amino acid
  VARIANT 39: note = X can be any amino acid
  VARIANT 40: note = X can be any amino acid
  VARIANT 41: note = X can be any amino acid
  VARIANT 42: note = X can be any amino acid
  VARIANT 43: note = X can be any amino acid
  VARIANT 48: note = X can be any amino acid
  VARIANT 49: note = X can be any amino acid
  VARIANT 50: note = X can be any amino acid
  VARIANT 51: note = X can be any amino acid
  VARIANT 53: note = X can be any amino acid
  VARIANT 54: note = X can be any amino acid
  VARIANT 55: note = X can be any amino acid
  VARIANT 58: note = X can be any amino acid
  VARIANT 59: note = X can be any amino acid
  VARIANT 61: note = X can be any amino acid
  VARIANT 62: note = X can be any amino acid
  VARIANT 63: note = X can be any amino acid
  VARIANT 64: note = X can be any amino acid
  VARIANT 65: note = X can be any amino acid
  VARIANT 66: note = X can be any amino acid
  VARIANT 67: note = X can be any amino acid
  VARIANT 68: note = X can be any amino acid
  VARIANT 69: note = X can be any amino acid
  VARIANT 71: note = X can be any amino acid
  VARIANT 72: note = X can be any amino acid
  VARIANT 73: note = X can be any amino acid
  VARIANT 77: note = X can be any amino acid
  VARIANT 78: note = X can be any amino acid
  VARIANT 79: note = X can be any amino acid
  VARIANT 80: note = X can be any amino acid
  VARIANT 81: note = X can be any amino acid
  VARIANT 84: note = X can be any amino acid
  VARIANT 86: note = X can be any amino acid
  VARIANT 88: note = X can be any amino acid
  VARIANT 89: note = X can be any amino acid
  VARIANT 90: note = X can be any amino acid
  VARIANT 93: note = X can be any amino acid
  VARIANT 94: note = X can be any amino acid
  VARIANT 95: note = X can be any amino acid
  VARIANT 96: note = X can be any amino acid
  VARIANT 98: note = X can be any amino acid
  VARIANT 99: note = X can be any amino acid
  VARIANT 100: note = X can be any amino acid
  VARIANT 102: note = X can be any amino acid
  VARIANT 103: note = X can be any amino acid
  VARIANT 104: note = X can be any amino acid
  VARIANT 106: note = X can be any amino acid
  VARIANT 107: note = X can be any amino acid
  VARIANT 108: note = X can be any amino acid
  VARIANT 109: note = X can be any amino acid
  VARIANT 110: note = X can be any amino acid
  VARIANT 111: note = X can be any amino acid
  VARIANT 112: note = X can be any amino acid
  VARIANT 113: note = X can be any amino acid
  VARIANT 114: note = X can be any amino acid
  VARIANT 115: note = X can be any amino acid
  VARIANT 116: note = X can be any amino acid
  VARIANT 117: note = X can be any amino acid
  VARIANT 118: note = X can be any amino acid
  VARIANT 119: note = X can be any amino acid
  VARIANT 120: note = X can be any amino acid
  VARIANT 121: note = X can be any amino acid
  VARIANT 122: note = X can be any amino acid
  VARIANT 123: note = X can be any amino acid
  VARIANT 124: note = X can be any amino acid
  VARIANT 125: note = X can be any amino acid
  VARIANT 127: note = X can be any amino acid
  VARIANT 133: note = X can be any amino acid
  VARIANT 134: note = X can be any amino acid
  VARIANT 137: note = X can be any amino acid
  VARIANT 138: note = X can be any amino acid
  VARIANT 139: note = X can be any amino acid
  VARIANT 141: note = X can be any amino acid
  VARIANT 142: note = X can be any amino acid
  VARIANT 143: note = X can be any amino acid
  VARIANT 144: note = X can be any amino acid
  VARIANT 145: note = X can be any amino acid
  VARIANT 148: note = X can be any amino acid
  VARIANT 151: note = X can be any amino acid
  VARIANT 152: note = X can be any amino acid
  VARIANT 153: note = X can be any amino acid
  VARIANT 155: note = X can be any amino acid
  VARIANT 156: note = X can be any amino acid
  VARIANT 157: note = X can be any amino acid
  VARIANT 158: note = X can be any amino acid
  VARIANT 159: note = X can be any amino acid
  VARIANT 160: note = X can be any amino acid
  VARIANT 168: note = X can be any amino acid
  VARIANT 172: note = X can be any amino acid
  VARIANT 173: note = X can be any amino acid
  VARIANT 174: note = X can be any amino acid
  VARIANT 175: note = X can be any amino acid
  VARIANT 176: note = X can be any amino acid
  VARIANT 177: note = X can be any amino acid
  VARIANT 178: note = X can be any amino acid
  VARIANT 179: note = X can be any amino acid
  VARIANT 180: note = X can be any amino acid
  VARIANT 181: note = X can be any amino acid
  VARIANT 182: note = X can be any amino acid
  VARIANT 183: note = X can be any amino acid
  VARIANT 184: note = X can be any amino acid
  VARIANT 185: note = X can be any amino acid
  VARIANT 186: note = X can be any amino acid
  VARIANT 187: note = X can be any amino acid
  VARIANT 188: note = X can be any amino acid
  VARIANT 189: note = X can be any amino acid
  VARIANT 190: note = X can be any amino acid
  VARIANT 191: note = X can be any amino acid
  VARIANT 192: note = X can be any amino acid
  VARIANT 193: note = X can be any amino acid
  VARIANT 197: note = X can be any amino acid
  VARIANT 198: note = X can be any amino acid
  VARIANT 199: note = X can be any amino acid
  VARIANT 200: note = X can be any amino acid
  VARIANT 201: note = X can be any amino acid
  VARIANT 203: note = X can be any amino acid
  VARIANT 204: note = X can be any amino acid
  VARIANT 205: note = X can be any amino acid
  VARIANT 206: note = X can be any amino acid
  VARIANT 207: note = X can be any amino acid
  VARIANT 208: note = X can be any amino acid
  VARIANT 209: note = X can be any amino acid
  VARIANT 210: note = X can be any amino acid
  VARIANT 211: note = X can be any amino acid
  VARIANT 213: note = X can be any amino acid
  VARIANT 217: note = X can be any amino acid
  VARIANT 218: note = X can be any amino acid
  VARIANT 221: note = X can be any amino acid
  VARIANT 222: note = X can be any amino acid
  VARIANT 223: note = X can be any amino acid
  VARIANT 224: note = X can be any amino acid
  VARIANT 225: note = X can be any amino acid
  VARIANT 226: note = X can be any amino acid
  VARIANT 228: note = X can be any amino acid
  VARIANT 229: note = X can be any amino acid
  VARIANT 230: note = X can be any amino acid
  VARIANT 231: note = X can be any amino acid
  VARIANT 232: note = X can be any amino acid
  VARIANT 233: note = X can be any amino acid
  VARIANT 236: note = X can be any amino acid
  VARIANT 237: note = X can be any amino acid
  VARIANT 238: note = X can be any amino acid
  VARIANT 239: note = X can be any amino acid
  VARIANT 240: note = X can be any amino acid
  VARIANT 241: note = X can be any amino acid
  VARIANT 242: note = X can be any amino acid
  VARIANT 243: note = X can be any amino acid
YXXFXXXKXXGGXRXIXAPXXXLXXXQXXXXXXXXXXXXXXXXAHGFXXXXSXXXNAXXHXXXXXXXXXDXXXFFPXXXXXRVXGXFXXXGYXXXXAXXXAXXXTXXXXXXXXXXXXXXXXXXXXRXLPQGAXXSPXXXNXXXXXLDXRLXXXAXXXXXXYTRYADDXTFSXXXXXXXXXXXXXXXXXXXXXXEGFXXXXXKXXXXXXXXXQXVTGXXVNXXXXXXRXXXXXXRAXXXXXXXX

SEQ ID NO: 19394 - protein, 243 aa, synthetic construct
  VARIANT 2: note = X can be any amino acid
  VARIANT 3: note = X can be any amino acid
  VARIANT 5: note = X can be any amino acid
  VARIANT 6: note = X can be any amino acid
  VARIANT 9: note = X can be any amino acid
  VARIANT 10: note = X can be any amino acid
  VARIANT 13: note = X can be any amino acid
  VARIANT 15: note = X can be any amino acid
  VARIANT 17: note = X can be any amino acid
  VARIANT 20: note = X can be any amino acid
  VARIANT 21: note = X can be any amino acid
  VARIANT 22: note = X can be any amino acid
  VARIANT 24: note = X can be any amino acid
  VARIANT 25: note = X can be any amino acid
  VARIANT 26: note = X can be any amino acid
  VARIANT 28: note = X can be any amino acid
  VARIANT 29: note = X can be any amino acid
  VARIANT 30: note = X can be any amino acid
  VARIANT 32: note = X can be any amino acid
  VARIANT 33: note = X can be any amino acid
  VARIANT 34: note = X can be any amino acid
  VARIANT 35: note = X can be any amino acid
  VARIANT 36: note = X can be any amino acid
  VARIANT 37: note = X can be any amino acid
  VARIANT 38: note = X can be any amino acid
  VARIANT 39: note = X can be any amino acid
  VARIANT 40: note = X can be any amino acid
  VARIANT 41: note = X can be any amino acid
  VARIANT 42: note = X can be any amino acid
  VARIANT 43: note = X can be any amino acid
  VARIANT 48: note = X can be any amino acid
  VARIANT 49: note = X can be any amino acid
  VARIANT 50: note = X can be any amino acid
  VARIANT 51: note = X can be any amino acid
  VARIANT 53: note = X can be any amino acid
  VARIANT 54: note = X can be any amino acid
  VARIANT 55: note = X can be any amino acid
  VARIANT 58: note = X can be any amino acid
  VARIANT 59: note = X can be any amino acid
  VARIANT 61: note = X can be any amino acid
  VARIANT 62: note = X can be any amino acid
  VARIANT 63: note = X can be any amino acid
  VARIANT 64: note = X can be any amino acid
  VARIANT 65: note = X can be any amino acid
  VARIANT 66: note = X can be any amino acid
  VARIANT 67: note = X can be any amino acid
  VARIANT 68: note = X can be any amino acid
  VARIANT 69: note = X can be any amino acid
  VARIANT 71: note = X can be any amino acid
  VARIANT 72: note = X can be any amino acid
  VARIANT 73: note = X can be any amino acid
  VARIANT 77: note = X can be any amino acid
  VARIANT 78: note = X can be any amino acid
  VARIANT 79: note = X can be any amino acid
  VARIANT 80: note = X can be any amino acid
  VARIANT 81: note = X can be any amino acid
  VARIANT 84: note = X can be any amino acid
  VARIANT 86: note = X can be any amino acid
  VARIANT 88: note = X can be any amino acid
  VARIANT 89: note = X can be any amino acid
  VARIANT 90: note = X can be any amino acid
  VARIANT 93: note = X can be any amino acid
  VARIANT 94: note = X can be any amino acid
  VARIANT 95: note = X can be any amino acid
  VARIANT 96: note = X can be any amino acid
  VARIANT 98: note = X can be any amino acid
  VARIANT 99: note = X can be any amino acid
  VARIANT 100: note = X can be any amino acid
  VARIANT 101: note = X can be any amino acid
  VARIANT 103: note = X can be any amino acid
  VARIANT 104: note = X can be any amino acid
  VARIANT 106: note = X can be any amino acid
  VARIANT 107: note = X can be any amino acid
  VARIANT 108: note = X can be any amino acid
  VARIANT 109: note = X can be any amino acid
  VARIANT 110: note = X can be any amino acid
  VARIANT 111: note = X can be any amino acid
  VARIANT 112: note = X can be any amino acid
  VARIANT 113: note = X can be any amino acid
  VARIANT 114: note = X can be any amino acid
  VARIANT 115: note = X can be any amino acid
  VARIANT 116: note = X can be any amino acid
  VARIANT 117: note = X can be any amino acid
  VARIANT 118: note = X can be any amino acid
  VARIANT 119: note = X can be any amino acid
  VARIANT 120: note = X can be any amino acid
  VARIANT 121: note = X can be any amino acid
  VARIANT 122: note = X can be any amino acid
  VARIANT 123: note = X can be any amino acid
  VARIANT 124: note = X can be any amino acid
  VARIANT 125: note = X can be any amino acid
  VARIANT 127: note = X can be any amino acid
  VARIANT 133: note = X can be any amino acid
  VARIANT 134: note = X can be any amino acid
  VARIANT 137: note = X can be any amino acid
  VARIANT 138: note = X can be any amino acid
  VARIANT 139: note = X can be any amino acid
  VARIANT 141: note = X can be any amino acid
  VARIANT 142: note = X can be any amino acid
  VARIANT 143: note = X can be any amino acid
  VARIANT 144: note = X can be any amino acid
  VARIANT 145: note = X can be any amino acid
  VARIANT 148: note = X can be any amino acid
  VARIANT 151: note = X can be any amino acid
  VARIANT 152: note = X can be any amino acid
  VARIANT 153: note = X can be any amino acid
  VARIANT 155: note = X can be any amino acid
  VARIANT 156: note = X can be any amino acid
  VARIANT 157: note = X can be any amino acid
  VARIANT 159: note = X can be any amino acid
  VARIANT 160: note = X can be any amino acid
  VARIANT 172: note = X can be any amino acid
  VARIANT 173: note = X can be any amino acid
  VARIANT 174: note = X can be any amino acid
  VARIANT 175: note = X can be any amino acid
  VARIANT 176: note = X can be any amino acid
  VARIANT 177: note = X can be any amino acid
  VARIANT 178: note = X can be any amino acid
  VARIANT 179: note = X can be any amino acid
  VARIANT 180: note = X can be any amino acid
  VARIANT 181: note = X can be any amino acid
  VARIANT 182: note = X can be any amino acid
  VARIANT 183: note = X can be any amino acid
  VARIANT 184: note = X can be any amino acid
  VARIANT 185: note = X can be any amino acid
  VARIANT 186: note = X can be any amino acid
  VARIANT 187: note = X can be any amino acid
  VARIANT 188: note = X can be any amino acid
  VARIANT 189: note = X can be any amino acid
  VARIANT 190: note = X can be any amino acid
  VARIANT 191: note = X can be any amino acid
  VARIANT 192: note = X can be any amino acid
  VARIANT 193: note = X can be any amino acid
  VARIANT 197: note = X can be any amino acid
  VARIANT 198: note = X can be any amino acid
  VARIANT 199: note = X can be any amino acid
  VARIANT 200: note = X can be any amino acid
  VARIANT 201: note = X can be any amino acid
  VARIANT 203: note = X can be any amino acid
  VARIANT 204: note = X can be any amino acid
  VARIANT 205: note = X can be any amino acid
  VARIANT 206: note = X can be any amino acid
  VARIANT 208: note = X can be any amino acid
  VARIANT 209: note = X can be any amino acid
  VARIANT 210: note = X can be any amino acid
  VARIANT 211: note = X can be any amino acid
  VARIANT 213: note = X can be any amino acid
  VARIANT 217: note = X can be any amino acid
  VARIANT 221: note = X can be any amino acid
  VARIANT 222: note = X can be any amino acid
  VARIANT 223: note = X can be any amino acid
  VARIANT 224: note = X can be any amino acid
  VARIANT 225: note = X can be any amino acid
  VARIANT 226: note = X can be any amino acid
  VARIANT 228: note = X can be any amino acid
  VARIANT 229: note = X can be any amino acid
  VARIANT 230: note = X can be any amino acid
  VARIANT 231: note = X can be any amino acid
  VARIANT 232: note = X can be any amino acid
  VARIANT 233: note = X can be any amino acid
  VARIANT 236: note = X can be any amino acid
  VARIANT 237: note = X can be any amino acid
  VARIANT 238: note = X can be any amino acid
  VARIANT 239: note = X can be any amino acid
  VARIANT 240: note = X can be any amino acid
  VARIANT 241: note = X can be any amino acid
  VARIANT 242: note = X can be any amino acid
  VARIANT 243: note = X can be any amino acid
YXXFXXPKXXGGXRXIXAPXXXLXXXQXXXLXXXXXXXXXXXXAHGFXXXXSXXXNAXXHXXXXXXXXXDXXXFFPXXXXXRVXGXFXXXGYXXXXAXXXXLXXTXXXXXXXXXXXXXXXXXXXXRXLPQGAXXSPXXXNXXXXXLDXRLXXXAXXXGXXYTRYADDLTFSXXXXXXXXXXXXXXXXXXXXXXEGFXXXXXKXXXXRXXXXQXVTGXVVNXXXXXXRXXXXXXRAXXXXXXXX

SEQ ID NO: 19395 - protein, 236 aa, synthetic construct
  VARIANT 2: note = X can be any amino acid
  VARIANT 3: note = X can be any amino acid
  VARIANT 5: note = X can be any amino acid
  VARIANT 7: note = X can be any amino acid
  VARIANT 10: note = X can be any amino acid
  VARIANT 12: note = X can be any amino acid
  VARIANT 13: note = X can be any amino acid
  VARIANT 15: note = X can be any amino acid
  VARIANT 17: note = X can be any amino acid
  VARIANT 18: note = X can be any amino acid
  VARIANT 20: note = X can be any amino acid
  VARIANT 21: note = X can be any amino acid
  VARIANT 22: note = X can be any amino acid
  VARIANT 24: note = X can be any amino acid
  VARIANT 25: note = X can be any amino acid
  VARIANT 26: note = X can be any amino acid
  VARIANT 27: note = X can be any amino acid
  VARIANT 28: note = X can be any amino acid
  VARIANT 29: note = X can be any amino acid
  VARIANT 30: note = X can be any amino acid
  VARIANT 31: note = X can be any amino acid
  VARIANT 32: note = X can be any amino acid
  VARIANT 33: note = X can be any amino acid
  VARIANT 34: note = X can be any amino acid
  VARIANT 35: note = X can be any amino acid
  VARIANT 36: note = X can be any amino acid
  VARIANT 37: note = X can be any amino acid
  VARIANT 38: note = X can be any amino acid
  VARIANT 39: note = X can be any amino acid
  VARIANT 40: note = X can be any amino acid
  VARIANT 41: note = X can be any amino acid
  VARIANT 42: note = X can be any amino acid
  VARIANT 43: note = X can be any amino acid
  VARIANT 44: note = X can be any amino acid
  VARIANT 45: note = X can be any amino acid
  VARIANT 48: note = X can be any amino acid
  VARIANT 49: note = X can be any amino acid
  VARIANT 50: note = X can be any amino acid
  VARIANT 51: note = X can be any amino acid
  VARIANT 53: note = X can be any amino acid
  VARIANT 54: note = X can be any amino acid
  VARIANT 55: note = X can be any amino acid
  VARIANT 58: note = X can be any amino acid
  VARIANT 59: note = X can be any amino acid
  VARIANT 61: note = X can be any amino acid
  VARIANT 62: note = X can be any amino acid
  VARIANT 63: note = X can be any amino acid
  VARIANT 64: note = X can be any amino acid
  VARIANT 65: note = X can be any amino acid
  VARIANT 67: note = X can be any amino acid
  VARIANT 69: note = X can be any amino acid
  VARIANT 72: note = X can be any amino acid
  VARIANT 76: note = X can be any amino acid
  VARIANT 78: note = X can be any amino acid
  VARIANT 79: note = X can be any amino acid
  VARIANT 80: note = X can be any amino acid
  VARIANT 81: note = X can be any amino acid
  VARIANT 83: note = X can be any amino acid
  VARIANT 84: note = X can be any amino acid
  VARIANT 85: note = X can be any amino acid
  VARIANT 86: note = X can be any amino acid
  VARIANT 87: note = X can be any amino acid
  VARIANT 88: note = X can be any amino acid
  VARIANT 89: note = X can be any amino acid
  VARIANT 90: note = X can be any amino acid
  VARIANT 92: note = X can be any amino acid
  VARIANT 93: note = X can be any amino acid
  VARIANT 94: note = X can be any amino acid
  VARIANT 95: note = X can be any amino acid
  VARIANT 96: note = X can be any amino acid
  VARIANT 97: note = X can be any amino acid
  VARIANT 98: note = X can be any amino acid
  VARIANT 99: note = X can be any amino acid
  VARIANT 101: note = X can be any amino acid
  VARIANT 102: note = X can be any amino acid
  VARIANT 103: note = X can be any amino acid
  VARIANT 104: note = X can be any amino acid
  VARIANT 105: note = X can be any amino acid
  VARIANT 108: note = X can be any amino acid
  VARIANT 109: note = X can be any amino acid
  VARIANT 110: note = X can be any amino acid
  VARIANT 111: note = X can be any amino acid
  VARIANT 112: note = X can be any amino acid
  VARIANT 113: note = X can be any amino acid
  VARIANT 114: note = X can be any amino acid
  VARIANT 115: note = X can be any amino acid
  VARIANT 116: note = X can be any amino acid
  VARIANT 117: note = X can be any amino acid
  VARIANT 118: note = X can be any amino acid
  VARIANT 119: note = X can be any amino acid
  VARIANT 120: note = X can be any amino acid
  VARIANT 125: note = X can be any amino acid
  VARIANT 127: note = X can be any amino acid
  VARIANT 130: note = X can be any amino acid
  VARIANT 131: note = X can be any amino acid
  VARIANT 132: note = X can be any amino acid
  VARIANT 134: note = X can be any amino acid
  VARIANT 135: note = X can be any amino acid
  VARIANT 137: note = X can be any amino acid
  VARIANT 138: note = X can be any amino acid
  VARIANT 141: note = X can be any amino acid
  VARIANT 142: note = X can be any amino acid
  VARIANT 144: note = X can be any amino acid
  VARIANT 145: note = X can be any amino acid
  VARIANT 146: note = X can be any amino acid
  VARIANT 148: note = X can be any amino acid
  VARIANT 149: note = X can be any amino acid
  VARIANT 150: note = X can be any amino acid
  VARIANT 151: note = X can be any amino acid
  VARIANT 152: note = X can be any amino acid
  VARIANT 153: note = X can be any amino acid
  VARIANT 155: note = X can be any amino acid
  VARIANT 161: note = X can be any amino acid
  VARIANT 165: note = X can be any amino acid
  VARIANT 166: note = X can be any amino acid
  VARIANT 167: note = X can be any amino acid
  VARIANT 168: note = X can be any amino acid
  VARIANT 169: note = X can be any amino acid
  VARIANT 170: note = X can be any amino acid
  VARIANT 171: note = X can be any amino acid
  VARIANT 172: note = X can be any amino acid
  VARIANT 173: note = X can be any amino acid
  VARIANT 174: note = X can be any amino acid
  VARIANT 175: note = X can be any amino acid
  VARIANT 177: note = X can be any amino acid
  VARIANT 178: note = X can be any amino acid
  VARIANT 179: note = X can be any amino acid
  VARIANT 180: note = X can be any amino acid
  VARIANT 181: note = X can be any amino acid
  VARIANT 182: note = X can be any amino acid
  VARIANT 184: note = X can be any amino acid
  VARIANT 185: note = X can be any amino acid
  VARIANT 186: note = X can be any amino acid
  VARIANT 187: note = X can be any amino acid
  VARIANT 188: note = X can be any amino acid
  VARIANT 189: note = X can be any amino acid
  VARIANT 190: note = X can be any amino acid
  VARIANT 191: note = X can be any amino acid
  VARIANT 193: note = X can be any amino acid
  VARIANT 194: note = X can be any amino acid
  VARIANT 198: note = X can be any amino acid
  VARIANT 199: note = X can be any amino acid
  VARIANT 200: note = X can be any amino acid
  VARIANT 201: note = X can be any amino acid
  VARIANT 202: note = X can be any amino acid
  VARIANT 203: note = X can be any amino acid
  VARIANT 210: note = X can be any amino acid
  VARIANT 211: note = X can be any amino acid
  VARIANT 213: note = X can be any amino acid
  VARIANT 214: note = X can be any amino acid
  VARIANT 215: note = X can be any amino acid
  VARIANT 216: note = X can be any amino acid
  VARIANT 219: note = X can be any amino acid
  VARIANT 220: note = X can be any amino acid
  VARIANT 221: note = X can be any amino acid
  VARIANT 223: note = X can be any amino acid
  VARIANT 224: note = X can be any amino acid
  VARIANT 225: note = X can be any amino acid
  VARIANT 226: note = X can be any amino acid
  VARIANT 228: note = X can be any amino acid
  VARIANT 229: note = X can be any amino acid
  VARIANT 231: note = X can be any amino acid
  VARIANT 232: note = X can be any amino acid
  VARIANT 234: note = X can be any amino acid
  VARIANT 235: note = X can be any amino acid
  VARIANT 236: note = X can be any amino acid
YXXFXIXKKXGXXRXIXXPXXXLXXXXXXXXXXXXXXXXXXXXXXGFXXXXSXXXNAXXHXXXXXVXNXDLXDFFXSXXXXRXXXXXXXXPXXXXXXXXAXXXXXLCXXXXXXXXXXXXXLPQGXPXSPXXXNXXCXXLDXXLXXXAXXXXXXYXRYADDXTFSXXXXXXXXXXXFXXXXXXIXXXXXXXXNXXKTRXXXXXXRQEVTGXXVXXXXNVXXXYXXXXRXXLXXWXXX

SEQ ID NO: 19396 - protein, 238 aa, synthetic construct
  VARIANT 2: note = X can be any amino acid
  VARIANT 3: note = X can be any amino acid
  VARIANT 5: note = X can be any amino acid
  VARIANT 6: note = X can be any amino acid
  VARIANT 7: note = X can be any amino acid
  VARIANT 13: note = X can be any amino acid
  VARIANT 15: note = X can be any amino acid
  VARIANT 17: note = X can be any amino acid
  VARIANT 18: note = X can be any amino acid
  VARIANT 20: note = X can be any amino acid
  VARIANT 24: note = X can be any amino acid
  VARIANT 26: note = X can be any amino acid
  VARIANT 28: note = X can be any amino acid
  VARIANT 33: note = X can be any amino acid
  VARIANT 36: note = X can be any amino acid
  VARIANT 37: note = X can be any amino acid
  VARIANT 39: note = X can be any amino acid
  VARIANT 41: note = X can be any amino acid
  VARIANT 42: note = X can be any amino acid
  VARIANT 43: note = X can be any amino acid
  VARIANT 47: note = X can be any amino acid
  VARIANT 48: note = X can be any amino acid
  VARIANT 49: note = X can be any amino acid
  VARIANT 50: note = X can be any amino acid
  VARIANT 51: note = X can be any amino acid
  VARIANT 54: note = X can be any amino acid
  VARIANT 58: note = X can be any amino acid
  VARIANT 59: note = X can be any amino acid
  VARIANT 61: note = X can be any amino acid
  VARIANT 62: note = X can be any amino acid
  VARIANT 64: note = X can be any amino acid
  VARIANT 66: note = X can be any amino acid
  VARIANT 69: note = X can be any amino acid
  VARIANT 72: note = X can be any amino acid
  VARIANT 76: note = X can be any amino acid
  VARIANT 80: note = X can be any amino acid
  VARIANT 86: note = X can be any amino acid
  VARIANT 90: note = X can be any amino acid
  VARIANT 93: note = X can be any amino acid
  VARIANT 95: note = X can be any amino acid
  VARIANT 96: note = X can be any amino acid
  VARIANT 97: note = X can be any amino acid
  VARIANT 101: note = X can be any amino acid
  VARIANT 102: note = X can be any amino acid
  VARIANT 104: note = X can be any amino acid
  VARIANT 108: note = X can be any amino acid
  VARIANT 109: note = X can be any amino acid
  VARIANT 118: note = X can be any amino acid
  VARIANT 122: note = X can be any amino acid
  VARIANT 128: note = X can be any amino acid
  VARIANT 129: note = X can be any amino acid
  VARIANT 130: note = X can be any amino acid
  VARIANT 132: note = X can be any amino acid
  VARIANT 136: note = X can be any amino acid
  VARIANT 139: note = X can be any amino acid
  VARIANT 140: note = X can be any amino acid
  VARIANT 141: note = X can be any amino acid
  VARIANT 142: note = X can be any amino acid
  VARIANT 143: note = X can be any amino acid
  VARIANT 144: note = X can be any amino acid
  VARIANT 154: note = X can be any amino acid
  VARIANT 156: note = X can be any amino acid
  VARIANT 157: note = X can be any amino acid
  VARIANT 158: note = X can be any amino acid
  VARIANT 159: note = X can be any amino acid
  VARIANT 160: note = X can be any amino acid
  VARIANT 163: note = X can be any amino acid
  VARIANT 164: note = X can be any amino acid
  VARIANT 166: note = X can be any amino acid
  VARIANT 167: note = X can be any amino acid
  VARIANT 168: note = X can be any amino acid
  VARIANT 169: note = X can be any amino acid
  VARIANT 170: note = X can be any amino acid
  VARIANT 171: note = X can be any amino acid
  VARIANT 172: note = X can be any amino acid
  VARIANT 173: note = X can be any amino acid
  VARIANT 174: note = X can be any amino acid
  VARIANT 175: note = X can be any amino acid
  VARIANT 176: note = X can be any amino acid
  VARIANT 177: note = X can be any amino acid
  VARIANT 180: note = X can be any amino acid
  VARIANT 183: note = X can be any amino acid
  VARIANT 184: note = X can be any amino acid
  VARIANT 187: note = X can be any amino acid
  VARIANT 188: note = X can be any amino acid
  VARIANT 192: note = X can be any amino acid
  VARIANT 195: note = X can be any amino acid
  VARIANT 196: note = X can be any amino acid
  VARIANT 198: note = X can be any amino acid
  VARIANT 201: note = X can be any amino acid
  VARIANT 203: note = X can be any amino acid
  VARIANT 204: note = X can be any amino acid
  VARIANT 206: note = X can be any amino acid
  VARIANT 208: note = X can be any amino acid
  VARIANT 213: note = X can be any amino acid
  VARIANT 216: note = X can be any amino acid
  VARIANT 217: note = X can be any amino acid
  VARIANT 221: note = X can be any amino acid
  VARIANT 228: note = X can be any amino acid
  VARIANT 229: note = X can be any amino acid
  VARIANT 230: note = X can be any amino acid
  VARIANT 231: note = X can be any amino acid
  VARIANT 238: note = X can be any amino acid
YXXFXXXKKSGGXRXIXXPXKSLXIXQXKLSQXLYXXYXPXXXVHGXXXXXSIXTNAXXHXXKXFXLNXDIXDFFXSINXGRVRGXFIAXPYXLXXXVATXXAXICCXXNKLPQGAPXSPIXSNLICXXXDXELQXFAXXXXXXYTRYADDITXSXXXXXLPXXLXXXXXXXXXXXXLGXELXXIIXXNGFXINXXKXRLXYXXQXQXVTGLXVNXXVNVXRKYIRNXXXXLHAWEKX

SEQ ID NO: 19397 - protein, 222 aa, synthetic construct
  VARIANT 2: note = X can be any amino acid
  VARIANT 3: note = X can be any amino acid
  VARIANT 5: note = X can be any amino acid
  VARIANT 6: note = X can be any amino acid
  VARIANT 7: note = X can be any amino acid
  VARIANT 9: note = X can be any amino acid
  VARIANT 10: note = X can be any amino acid
  VARIANT 12: note = X can be any amino acid
  VARIANT 13: note = X can be any amino acid
  VARIANT 15: note = X can be any amino acid
  VARIANT 17: note = X can be any amino acid
  VARIANT 20: note = X can be any amino acid
  VARIANT 21: note = X can be any amino acid
  VARIANT 22: note = X can be any amino acid
  VARIANT 25: note = X can be any amino acid
  VARIANT 26: note = X can be any amino acid
  VARIANT 28: note = X can be any amino acid
  VARIANT 29: note = X can be any amino acid
  VARIANT 32: note = X can be any amino acid
  VARIANT 33: note = X can be any amino acid
  VARIANT 34: note = X can be any amino acid
  VARIANT 36: note = X can be any amino acid
  VARIANT 37: note = X can be any amino acid
  VARIANT 39: note = X can be any amino acid
  VARIANT 41: note = X can be any amino acid
  VARIANT 42: note = X can be any amino acid
  VARIANT 43: note = X can be any amino acid
  VARIANT 45: note = X can be any amino acid
  VARIANT 49: note = X can be any amino acid
  VARIANT 50: note = X can be any amino acid
  VARIANT 54: note = X can be any amino acid
  VARIANT 58: note = X can be any amino acid
  VARIANT 59: note = X can be any amino acid
  VARIANT 61: note = X can be any amino acid
  VARIANT 62: note = X can be any amino acid
  VARIANT 63: note = X can be any amino acid
  VARIANT 64: note = X can be any amino acid
  VARIANT 65: note = X can be any amino acid
  VARIANT 66: note = X can be any amino acid
  VARIANT 67: note = X can be any amino acid
  VARIANT 69: note = X can be any amino acid
  VARIANT 71: note = X can be any amino acid
  VARIANT 73: note = X can be any amino acid
  VARIANT 78: note = X can be any amino acid
  VARIANT 79: note = X can be any amino acid
  VARIANT 80: note = X can be any amino acid
  VARIANT 81: note = X can be any amino acid
  VARIANT 84: note = X can be any amino acid
  VARIANT 86: note = X can be any amino acid
  VARIANT 87: note = X can be any amino acid
  VARIANT 88: note = X can be any amino acid
  VARIANT 89: note = X can be any amino acid
  VARIANT 94: note = X can be any amino acid
  VARIANT 95: note = X can be any amino acid
  VARIANT 96: note = X can be any amino acid
  VARIANT 97: note = X can be any amino acid
  VARIANT 98: note = X can be any amino acid
  VARIANT 99: note = X can be any amino acid
  VARIANT 102: note = X can be any amino acid
  VARIANT 104: note = X can be any amino acid
  VARIANT 106: note = X can be any amino acid
  VARIANT 107: note = X can be any amino acid
  VARIANT 108: note = X can be any amino acid
  VARIANT 109: note = X can be any amino acid
  VARIANT 112: note = X can be any amino acid
  VARIANT 119: note = X can be any amino acid
  VARIANT 120: note = X can be any amino acid
  VARIANT 121: note = X can be any amino acid
  VARIANT 123: note = X can be any amino acid
  VARIANT 124: note = X can be any amino acid
  VARIANT 125: note = X can be any amino acid
  VARIANT 126: note = X can be any amino acid
  VARIANT 128: note = X can be any amino acid
  VARIANT 130: note = X can be any amino acid
  VARIANT 132: note = X can be any amino acid
  VARIANT 133: note = X can be any amino acid
  VARIANT 134: note = X can be any amino acid
  VARIANT 136: note = X can be any amino acid
  VARIANT 137: note = X can be any amino acid
  VARIANT 139: note = X can be any amino acid
  VARIANT 140: note = X can be any amino acid
  VARIANT 142: note = X can be any amino acid
  VARIANT 150: note = X can be any amino acid
  VARIANT 151: note = X can be any amino acid
  VARIANT 152: note = X can be any amino acid
  VARIANT 155: note = X can be any amino acid
  VARIANT 156: note = X can be any amino acid
  VARIANT 157: note = X can be any amino acid
  VARIANT 158: note = X can be any amino acid
  VARIANT 159: note = X can be any amino acid
  VARIANT 160: note = X can be any amino acid
  VARIANT 161: note = X can be any amino acid
  VARIANT 162: note = X can be any amino acid
  VARIANT 167: note = X can be any amino acid
  VARIANT 168: note = X can be any amino acid
  VARIANT 170: note = X can be any amino acid
  VARIANT 171: note = X can be any amino acid
  VARIANT 172: note = X can be any amino acid
  VARIANT 176: note = X can be any amino acid
  VARIANT 177: note = X can be any amino acid
  VARIANT 180: note = X can be any amino acid
  VARIANT 182: note = X can be any amino acid
  VARIANT 183: note = X can be any amino acid
  VARIANT 185: note = X can be any amino acid
  VARIANT 187: note = X can be any amino acid
  VARIANT 189: note = X can be any amino acid
  VARIANT 192: note = X can be any amino acid
  VARIANT 193: note = X can be any amino acid
  VARIANT 196: note = X can be any amino acid
  VARIANT 200: note = X can be any amino acid
  VARIANT 202: note = X can be any amino acid
  VARIANT 204: note = X can be any amino acid
  VARIANT 205: note = X can be any amino acid
  VARIANT 206: note = X can be any amino acid
  VARIANT 207: note = X can be any amino acid
  VARIANT 209: note = X can be any amino acid
  VARIANT 210: note = X can be any amino acid
  VARIANT 211: note = X can be any amino acid
  VARIANT 216: note = X can be any amino acid
  VARIANT 217: note = X can be any amino acid
  VARIANT 220: note = X can be any amino acid
  VARIANT 221: note = X can be any amino acid
  VARIANT 222: note = X can be any amino acid
YXXFXXXKXXGXXRXIXAPXXXLKXXQXXILXXXLXXVXLXXXAXGFRXXRSIXTNAXXHXXXXXXXKXDXKXFFPSXXXXRVXGXXXXLGYPXXXXXXLTXLXTXXXXLPXGAPTSPXXXNXXXXRXDXRXXXLXXKXXFXYSRYADDXXXSSXXXXXXXXIPFFXXIXXXEGFXXNEXKXXIXRXGXRQXXTGXVVNXKXNXXXXEXXXLRAVXXNCXXX

SEQ ID NO: 19398 - protein, 221 aa, synthetic construct
  VARIANT 3: note = X can be any amino acid
  VARIANT 5: note = X can be any amino acid
  VARIANT 6: note = X can be any amino acid
  VARIANT 7: note = X can be any amino acid
  VARIANT 9: note = X can be any amino acid
  VARIANT 12: note = X can be any amino acid
  VARIANT 13: note = X can be any amino acid
  VARIANT 15: note = X can be any amino acid
  VARIANT 16: note = X can be any amino acid
  VARIANT 17: note = X can be any amino acid
  VARIANT 18: note = X can be any amino acid
  VARIANT 20: note = X can be any amino acid
  VARIANT 21: note = X can be any amino acid
  VARIANT 22: note = X can be any amino acid
  VARIANT 25: note = X can be any amino acid
  VARIANT 26: note = X can be any amino acid
  VARIANT 28: note = X can be any amino acid
  VARIANT 29: note = X can be any amino acid
  VARIANT 30: note = X can be any amino acid
  VARIANT 31: note = X can be any amino acid
  VARIANT 32: note = X can be any amino acid
  VARIANT 33: note = X can be any amino acid
  VARIANT 34: note = X can be any amino acid
  VARIANT 36: note = X can be any amino acid
  VARIANT 37: note = X can be any amino acid
  VARIANT 38: note = X can be any amino acid
  VARIANT 39: note = X can be any amino acid
  VARIANT 40: note = X can be any amino acid
  VARIANT 43: note = X can be any amino acid
  VARIANT 45: note = X can be any amino acid
  VARIANT 46: note = X can be any amino acid
  VARIANT 48: note = X can be any amino acid
  VARIANT 49: note = X can be any amino acid
  VARIANT 50: note = X can be any amino acid
  VARIANT 51: note = X can be any amino acid
  VARIANT 53: note = X can be any amino acid
  VARIANT 54: note = X can be any amino acid
  VARIANT 55: note = X can be any amino acid
  VARIANT 56: note = X can be any amino acid
  VARIANT 58: note = X can be any amino acid
  VARIANT 59: note = X can be any amino acid
  VARIANT 62: note = X can be any amino acid
  VARIANT 63: note = X can be any amino acid
  VARIANT 64: note = X can be any amino acid
  VARIANT 65: note = X can be any amino acid
  VARIANT 66: note = X can be any amino acid
  VARIANT 67: note = X can be any amino acid
  VARIANT 69: note = X can be any amino acid
  VARIANT 71: note = X can be any amino acid
  VARIANT 72: note = X can be any amino acid
  VARIANT 76: note = X can be any amino acid
  VARIANT 77: note = X can be any amino acid
  VARIANT 79: note = X can be any amino acid
  VARIANT 80: note = X can be any amino acid
  VARIANT 81: note = X can be any amino acid
  VARIANT 84: note = X can be any amino acid
  VARIANT 85: note = X can be any amino acid
  VARIANT 86: note = X can be any amino acid
  VARIANT 87: note = X can be any amino acid
  VARIANT 88: note = X can be any amino acid
  VARIANT 89: note = X can be any amino acid
  VARIANT 90: note = X can be any amino acid
  VARIANT 91: note = X can be any amino acid
  VARIANT 92: note = X can be any amino acid
  VARIANT 93: note = X can be any amino acid
  VARIANT 94: note = X can be any amino acid
  VARIANT 95: note = X can be any amino acid
  VARIANT 96: note = X can be any amino acid
  VARIANT 97: note = X can be any amino acid
  VARIANT 98: note = X can be any amino acid
  VARIANT 99: note = X can be any amino acid
  VARIANT 101: note = X can be any amino acid
  VARIANT 102: note = X can be any amino acid
  VARIANT 104: note = X can be any amino acid
  VARIANT 105: note = X can be any amino acid
  VARIANT 106: note = X can be any amino acid
  VARIANT 107: note = X can be any amino acid
  VARIANT 108: note = X can be any amino acid
  VARIANT 109: note = X can be any amino acid
  VARIANT 119: note = X can be any amino acid
  VARIANT 123: note = X can be any amino acid
  VARIANT 126: note = X can be any amino acid
  VARIANT 127: note = X can be any amino acid
  VARIANT 128: note = X can be any amino acid
  VARIANT 130: note = X can be any amino acid
  VARIANT 131: note = X can be any amino acid
  VARIANT 132: note = X can be any amino acid
  VARIANT 133: note = X can be any amino acid
  VARIANT 134: note = X can be any amino acid
  VARIANT 135: note = X can be any amino acid
  VARIANT 136: note = X can be any amino acid
  VARIANT 137: note = X can be any amino acid
  VARIANT 138: note = X can be any amino acid
  VARIANT 139: note = X can be any amino acid
  VARIANT 140: note = X can be any amino acid
  VARIANT 141: note = X can be any amino acid
  VARIANT 142: note = X can be any amino acid
  VARIANT 147: note = X can be any amino acid
  VARIANT 150: note = X can be any amino acid
  VARIANT 151: note = X can be any amino acid
  VARIANT 155: note = X can be any amino acid
  VARIANT 156: note = X can be any amino acid
  VARIANT 157: note = X can be any amino acid
  VARIANT 158: note = X can be any amino acid
  VARIANT 159: note = X can be any amino acid
  VARIANT 161: note = X can be any amino acid
  VARIANT 162: note = X can be any amino acid
  VARIANT 164: note = X can be any amino acid
  VARIANT 165: note = X can be any amino acid
  VARIANT 166: note = X can be any amino acid
  VARIANT 167: note = X can be any amino acid
  VARIANT 168: note = X can be any amino acid
  VARIANT 169: note = X can be any amino acid
  VARIANT 170: note = X can be any amino acid
  VARIANT 172: note = X can be any amino acid
  VARIANT 173: note = X can be any amino acid
  VARIANT 174: note = X can be any amino acid
  VARIANT 177: note = X can be any amino acid
  VARIANT 178: note = X can be any amino acid
  VARIANT 179: note = X can be any amino acid
  VARIANT 181: note = X can be any amino acid
  VARIANT 183: note = X can be any amino acid
  VARIANT 184: note = X can be any amino acid
  VARIANT 185: note = X can be any amino acid
  VARIANT 186: note = X can be any amino acid
  VARIANT 187: note = X can be any amino acid
  VARIANT 188: note = X can be any amino acid
  VARIANT 189: note = X can be any amino acid
  VARIANT 190: note = X can be any amino acid
  VARIANT 191: note = X can be any amino acid
  VARIANT 192: note = X can be any amino acid
  VARIANT 194: note = X can be any amino acid
  VARIANT 195: note = X can be any amino acid
  VARIANT 198: note = X can be any amino acid
  VARIANT 199: note = X can be any amino acid
  VARIANT 201: note = X can be any amino acid
  VARIANT 202: note = X can be any amino acid
  VARIANT 203: note = X can be any amino acid
  VARIANT 205: note = X can be any amino acid
  VARIANT 206: note = X can be any amino acid
  VARIANT 207: note = X can be any amino acid
  VARIANT 208: note = X can be any amino acid
  VARIANT 210: note = X can be any amino acid
  VARIANT 211: note = X can be any amino acid
  VARIANT 212: note = X can be any amino acid
  VARIANT 213: note = X can be any amino acid
  VARIANT 214: note = X can be any amino acid
  VARIANT 215: note = X can be any amino acid
  VARIANT 216: note = X can be any amino acid
  VARIANT 217: note = X can be any amino acid
  VARIANT 218: note = X can be any amino acid
  VARIANT 219: note = X can be any amino acid
  VARIANT 220: note = X can be any amino acid
  VARIANT 221: note = X can be any amino acid
YRXFXXXKXDGXXRXXXXPXXXLKXXQXXXXXXXLXXXXXHPXAXXFXXXXSXXXXAXXHAXXXXXXTXDXXDFFXXTXXXRVXXXXXXXXXXXXXXXXLXXLXXXXXXLPQGAPTSPXLSNXVNXXXDXXXXXXXXXXXXXYTRYXDDXXFSWXXXXXPXXFXXXXXXXLXXXGYXXXPXKXXXXXXXXXXPXXTGXXLXXXGXXXXPXXXXXXXXXXXX

SEQ ID NO: 19399 - protein, 7 aa, synthetic construct
PKKKRKV

SEQ ID NO: 19400 - protein, 8 aa, synthetic construct
VSRKRPRP

SEQ ID NO: 19401 - protein, 6 aa, synthetic construct
QRKRKQ

SEQ ID NO: 19402 - protein, 34 aa, synthetic construct
  VARIANT 12..13: note = X can be any amino acid
LTPAQVVAIASXXGGKQALETVQRLLPVLCQDHG

SEQ ID NO: 19403 - protein, 33 aa, synthetic construct
  VARIANT 12: note = X can be any amino acid
LTPAQVVAIASXGGKQALETVQRLLPVLCQDHG

SEQ ID NO: 19404 - protein, 34 aa, synthetic construct
  VARIANT 12..13: note = X can be any amino acid
LTPDQVVAIANXXGGKQALATVQRLLPVLCQDHG

SEQ ID NO: 19405 - protein, 34 aa, synthetic construct
  VARIANT 12..13: note = X can be any amino acid
LTPDQVVAIANXXGGKQALETLQRLLPVLCQDHG

SEQ ID NO: 19406 - protein, 34 aa, synthetic construct
  VARIANT 12..13: note = X can be any amino acid
LTPDQVVAIANXXGGKQALETVQRLLPVLCQDHG

SEQ ID NO: 19407 - protein, 34 aa, synthetic construct
  VARIANT 12..13: note = X can be any amino acid
LTPDQVVAIASXXGGKQALATVQRLLPVLCQDHG

SEQ ID NO: 19408 - protein, 34 aa, synthetic construct
  VARIANT 12..13: note = X can be any amino acid
LTPDQVVAIASXXGGKQALETVQRLLPVLCQDHG

SEQ ID NO: 19409 - protein, 34 aa, synthetic construct
  VARIANT 12..13: note = X can be any amino acid
LTPDQVVAIASXXGGKQALETVQRVLPVLCQDHG

SEQ ID NO: 19410 - protein, 34 aa, synthetic construct
  VARIANT 12..13: note = X can be any amino acid
LTPEQVVAIASXXGGKQALETVQRLLPVLCQAHG

SEQ ID NO: 19411 - protein, 34 aa, synthetic construct
  VARIANT 12..13: note = X can be any amino acid
LTPYQVVAIASXXGSKQALETVQRLLPVLCQDHG

SEQ ID NO: 19412 - protein, 34 aa, synthetic construct
  VARIANT 12..13: note = X can be any amino acid
LTREQVVAIASXXGGKQALETVQRLLPVLCQDHG

SEQ ID NO: 19413 - protein, 35 aa, synthetic construct
  VARIANT 12..13: note = X can be any amino acid
LSTAQVVAIASXXGGKQALEGIGEQLLKLRTAPYG

SEQ ID NO: 19414 - protein, 35 aa, synthetic construct
  VARIANT 12..13: note = X can be any amino acid
LSTAQVVAVASXXGGKPALEAVRAQLLALRAAPYG

SEQ ID NO: 19415 - protein, 288 aa, synthetic construct
MDPIRSRTPSPARELLSGPQPDGVQPTADRGVSPPAGGPLDGLPARRTMSRTRLPSPPAPSPAFSADSFSDLLRQFDPSLFNTSLFDSLPPFGAHHTEAATGEWDEVQSGLRAADAPPPTMRVAVTAARPPRAKPAPRRRAAQPSDASPAAQVDLRTLGYSQQQQEKIKPKVRSTVAQHHEALVGHGFTHAHIVALSQHPAALGTVAVKYQDMIAALPEATHEAIVGVGKQWSGARALEALLTVAGELRGPPLQLDTGQLLKIAKRGGVTAVEAVHAWRNALTGAPLN

SEQ ID NO: 19416 - protein, 183 aa, synthetic construct
RPALESIVAQLSRPDPALAALTNDHLVALACLGGRPALDAVKKGLPHAPALIKRTNRRIPERTSHRVADHAQVVRVLGFFQCHSHPAQAFDDAMTQFGMSRHGLLQLFRRVGVTELEARSGTLPPASQRWDRILQASGMKRAKPSPTSTQTPDQASLHAFADSLERDLDAPSPMHEGDQTRAS

SEQ ID NO: 19417 - protein, 8 aa, synthetic construct
GCGGCCGC

SEQ ID NO: 19418 - protein, 32 aa, synthetic construct
LEPGEKPYKCPECGKSFSQSGALTRHQRTHTR

SEQ ID NO: 19419 - protein, 16 aa, synthetic construct
  VARIANT 3..12: note = X can be any amino acid
KRXXXXXXXXXXKKKL

SEQ ID NO: 19420 - protein, 20 aa, synthetic construct
PKKKRKVEASSPKKRKVEAS

SEQ ID NO: 19421 - skipped

SEQ ID NO: 19422 - RNA, 81 nt, synthetic construct
  source 1..81: mol_type = other RNA
ggaaatcgcaaaatttgctcttcgcgttagatttcttttagttttctcgcaactagcaagctttttgttctcgccgccgcc

SEQ ID NO: 19423 - RNA, 81 nt, synthetic construct; identical to SEQ ID NO: 19422
  source 1..81: mol_type = other RNA

SEQ ID NO: 19424 - RNA, 81 nt, synthetic construct
  source 1..81: mol_type = other RNA
ggaaatcgcaaaattttcttttcgcgttagatttcttttagttttctttcaactagcaagctttttgttctcgccgccgcc

SEQ ID NO: 19425 - RNA, 83 nt, synthetic construct
  source 1..83: mol_type = other RNA
ggaaatcgcaaaatttttgctctttttcgcgttagatttcttttagttttctykcaactagcaagctttttgttctcgccrcc

SEQ ID NO: 19426 - RNA, 203 nt, synthetic construct
  source 1..203: mol_type = other RNA
ggaaatccccacaaccgcctcatatccaggctcaagaatagagctcagtgttttgttgtttaatcattccgacgtgttttgcgatattcgcgcaaagcagccagtcgcgcgcttgcttttaagtagagttgtttttccacccgtttgccaggcatctttaatttaacatatttttatttttcaggctaacctacgccgccacc

SEQ ID NO: 19427 - RNA, 76 nt, synthetic construct
  source 1..76: mol_type = other RNA
ggaaataagagagaaaagaagagtaagaagaaatataagatctccctgagcttcagggagccccggcgccgccacc

SEQ ID NO: 19428 - RNA, 89 nt, synthetic construct
  source 1..89: mol_type = other RNA
ggaaaccccccacccccgtaagagagaaaagaagagtaagaagaaatataagatctccctgagcttcagggagccccggcgccgccacc

SEQ ID NO: 19429 - RNA, 59 nt, synthetic construct
  source 1..59: mol_type = other RNA
ggagaacttccgcttccgttggcgcaagcgctttcattttttctgctaccgtgactaag

SEQ ID NO: 19430 - RNA, 46 nt, synthetic construct
  source 1..46: mol_type = other RNA
ggaaataagagagaaaagaagagtaagaagaaatataagagccacc

SEQ ID NO: 19431 - RNA, 56 nt, synthetic construct
  source 1..56: mol_type = other RNA
ggaaataagagagaaaagaagagtaagaagaaatataagaccccggcgccgccacc

SEQ ID NO: 19432 - RNA, 79 nt, synthetic construct
  source 1..79: mol_type = other RNA
ggaaactttatttagtgttactttattttctgtttatttgtgtttcttcagtgggtttgttctaatttccttggccgcc

SEQ ID NO: 19433 - RNA, 79 nt, synthetic construct
  source 1..79: mol_type = other RNA
ggaaaatctgtattaggttggcgtgttctttggtcggttgttagtattgttgttgattcgtttgtggtcggttgccgcc

SEQ ID NO: 19434 - RNA, 79 nt, synthetic construct
  source 1..79: mol_type = other RNA
ggaaaattattaacatcttggtattctcgataaccattcgttggattttattgtattcgtagtttgggttcctgccgcc

SEQ ID NO: 19435 - RNA, 79 nt, synthetic construct
  source 1..79: mol_type = other RNA
ggaaattattattatttctagctacaatttatcattgtattattttagctattcatcattatttacttggtgatcaaca

SEQ ID NO: 19436 - RNA, 79 nt, synthetic construct
  source 1..79: mol_type = other RNA
ggaaataggttgttaaccaagttcaagcctaataagcttggattctggtgacttgcttcaccgttggcgggcaccgatc

SEQ ID NO: 19437 - RNA, 74 nt, synthetic construct
  source 1..74: mol_type = other RNA
ggaaatcgtagagagtcgtacttagtacatatcgactatcggtggacaccatcaagattataaaccaggccaga

SEQ ID NO: 19438 - RNA, 79 nt, synthetic construct
  source 1..79: mol_type = other RNA
ggaaacccgcccaagcgaccccaacatatcagcagttgcccaatcccaactcccaacacaatccccaagcaacgccgcc

SEQ ID NO: 19439 - RNA, 79 nt, synthetic construct
  source 1..79: mol_type = other RNA
ggaaagcgattgaaggcgtcttttcaactactcgattaaggttgggtatcgtcgtgggacttggaaatttgttgtttcc

SEQ ID NO: 19440 - RNA, 79 nt, synthetic construct
  source 1..79: mol_type = other RNA
ggaaactaatcgaaataaaagagccccgtactcttttatttctattaggttaggagccttagcatttgtatcttaggta

SEQ ID NO: 19441 - RNA, 79 nt, synthetic construct
  source 1..79: mol_type = other RNA
ggaaatgtgatttccagcaacttcttttgaatatattgaattcctaattcaaagcgaacaaatctacaagccatatacc

SEQ ID NO: 19442 - RNA, 74 nt, synthetic construct
  source 1..74: mol_type = other RNA
ggaaatcgtagagagtcgtacttacgtggtcgccattgcatagcgcgcgaaagcaacaggaacaagaacgcgcc

SEQ ID NO: 19443 - RNA, 74 nt, synthetic construct
  source 1..74: mol_type = other RNA
ggaaatcgtagagagtcgtacttagaataaacagagtcgggtcgacttgtctctgatactacgacgtcacaatc

SEQ ID NO: 19444 - RNA, 79 nt, synthetic construct
  source 1..79: mol_type = other RNA
ggaaaatttgccttcggagttgcgtatcctgaactgcccagcctcctgatatacaactgttccgcttattcgggccgcc

SEQ ID NO: 19445 - RNA, 79 nt, synthetic construct
  source 1..79: mol_type = other RNA
ggaaatctgagcaggaatcctttgtgcattgaagactttagattcctctctgcggtagacgtgcacttataagtatttg

SEQ ID NO: 19446 - RNA, 79 nt, synthetic construct
  source 1..79: mol_type = other RNA
ggaaagcgattgaaggcgtcttttcaactactcgattaaggttgggtatcgtcgtgggacttggaaatttgttgccacc

SEQ ID NO: 19447 - RNA, 79 nt, synthetic construct
  source 1..79: mol_type = other RNA
ggaaaattttagcctggaacgttagataactgtcctgttgtctttatatacttggtccccaagtagtttgtcttccaaa

SEQ ID NO: 19448 - RNA, 104 nt, synthetic construct
  source 1..104: mol_type = other RNA
ggaaatttttttttgatattataagagtttttttttgatattaagaaaatttttttttgatattagaagagtaagaagaaatataagaccccggcgccgccacc

SEQ ID NO: 19449 - RNA, 57 nt, synthetic construct
  source 1..57: mol_type = other RNA
ggaaataagagagaaaagaagagtaagaagaaatataagagccaaaaaaaaaaaacc

SEQ ID NO: 19450 - RNA, 76 nt, synthetic construct
  source 1..76: mol_type = other RNA
ggaaatctccctgagcttcagggagtaagagagaaaagaagagtaagaagaaatataagaccccggcgccgccacc

SEQ ID NO: 19451 - RNA, 11 nt, synthetic construct
  source 1..11: mol_type = other RNA
gggatcctacc

SEQ ID NO: 19452 - RNA, 47 nt, synthetic construct
  source 1..47: mol_type = other RNA
gggaaataagagagaaaagaagagtaagaagaaatataagagccacc

SEQ ID NO: 19453 - DNA, 47 bp, synthetic construct
  source 1..47: mol_type = other DNA
gggaaataagagagaaaagaagagtaagaagaaatataagagccacc

SEQ ID NO: 19454-19459 - skipped (6 entries)

SEQ ID NO: 19460 - RNA, 15 nt, synthetic construct
  source 1..15: mol_type = other RNA
taagcccctccgggg

SEQ ID NO: 19461 - RNA, 15 nt, synthetic construct
  source 1..15: mol_type = other RNA
taaagctccccgggg

SEQ ID NO: 19462-19468 - skipped (7 entries)

SEQ ID NO: 19469 - protein, 6 aa, synthetic construct
GGSGGS

SEQ ID NO: 19470 - protein, 9 aa, synthetic construct
GGSGGSGGS

SEQ ID NO: 19471 - protein, 12 aa, synthetic construct
GGSGGSGGSGGS

SEQ ID NO: 19472 - protein, 15 aa, synthetic construct
GGSGGSGGSGGSGGS

SEQ ID NO: 19473 - protein, 18 aa, synthetic construct
GGSGGSGGSGGSGGSGGS

SEQ ID NO: 19474 - protein, 21 aa, synthetic construct
GGSGGSGGSGGSGGSGGSGGS

SEQ ID NO: 19475 - protein, 24 aa, synthetic construct
GGSGGSGGSGGSGGSGGSGGSGGS

SEQ ID NO: 19476 - protein, 27 aa, synthetic construct
GGSGGSGGSGGSGGSGGSGGSGGSGGS

SEQ ID NO: 19477 - protein, 30 aa, synthetic construct
GGSGGSGGSGGSGGSGGSGGSGGSGGSGGS

SEQ ID NO: 19478 - protein, 33 aa, synthetic construct
GGSGGSGGSGGSGGSGGSGGSGGSGGSGGSGGS

SEQ ID NO: 19479 - protein, 36 aa, synthetic construct
GGSGGSGGSGGSGGSGGSGGSGGSGGSGGSGGSGGS

SEQ ID NO: 19480 - protein, 39 aa, synthetic construct
GGSGGSGGSGGSGGSGGSGGSGGSGGSGGSGGSGGSGGS

SEQ ID NO: 19481 - protein, 42 aa, synthetic construct
GGSGGSGGSGGSGGSGGSGGSGGSGGSGGSGGSGGSGGSGGS

SEQ ID NO: 19482 - protein, 45 aa, synthetic construct
GGSGGSGGSGGSGGSGGSGGSGGSGGSGGSGGSGGSGGSGGSGGS

SEQ ID NO: 19483 - protein, 6 aa, synthetic construct
GSGGSG

SEQ ID NO: 19484 - protein, 9 aa, synthetic construct
GSGGSGGSG

SEQ ID NO: 19485 - protein, 12 aa, synthetic construct
GSGGSGGSGGSG

SEQ ID NO: 19486 - protein, 15 aa, synthetic construct
GSGGSGGSGGSGGSG

SEQ ID NO: 19487 - protein, 18 aa, synthetic construct
GSGGSGGSGGSGGSGGSG

SEQ ID NO: 19488 - protein, 24 aa, synthetic construct
GSGGSGGSGGSGGSGGSGGSGGSG

SEQ ID NO: 19489 - protein, 27 aa, synthetic construct
GSGGSGGSGGSGGSGGSGGSGGSGGSG

SEQ ID NO: 19490 - protein, 30 aa, synthetic construct
GSGGSGGSGGSGGSGGSGGSGGSGGSGGSG

SEQ ID NO: 19491 - protein, 33 aa, synthetic construct
GSGGSGGSGGSGGSGGSGGSGGSGGSGGSGGSG

SEQ ID NO: 19492 - protein, 36 aa, synthetic construct
GSGGSGGSGGSGGSGGSGGSGGSGGSGGSGGSGGSG

SEQ ID NO: 19493 - protein, 39 aa, synthetic construct
GSGGSGGSGGSGGSGGSGGSGGSGGSGGSGGSGGSGGSG

SEQ ID NO: 19494 - protein, 42 aa, synthetic construct
GSGGSGGSGGSGGSGGSGGSGGSGGSGGSGGSGGSGGSGGSG

SEQ ID NO: 19495 - protein, 45 aa, synthetic construct
GSGGSGGSGGSGGSGGSGGSGGSGGSGGSGGSGGSGGSGGSGGSG

SEQ ID NO: 19496 - protein, 4 aa, synthetic construct
GGGS

SEQ ID NO: 19497 - protein, 8 aa, synthetic construct
GGGSGGGS

SEQ ID NO: 19498 - protein, 12 aa, synthetic construct
GGGSGGGSGGGS

SEQ ID NO: 19499 - protein, 16 aa, synthetic construct
GGGSGGGSGGGSGGGS

SEQ ID NO: 19500 - protein, 20 aa, synthetic construct
GGGSGGGSGGGSGGGSGGGS

SEQ ID NO: 19501 - protein, 24 aa, synthetic construct
GGGSGGGSGGGSGGGSGGGSGGGS

SEQ ID NO: 19502 - protein, 28 aa, synthetic construct
GGGSGGGSGGGSGGGSGGGSGGGSGGGS

SEQ ID NO: 19503 - protein, 32 aa, synthetic construct
GGGSGGGSGGGSGGGSGGGSGGGSGGGSGGGS

SEQ ID NO: 19504 - protein, 36 aa, synthetic construct
GGGSGGGSGGGSGGGSGGGSGGGSGGGSGGGSGGGS

SEQ ID NO: 19505 - protein, 40 aa, synthetic construct
GGGSGGGSGGGSGGGSGGGSGGGSGGGSGGGSGGGSGGGS

SEQ ID NO: 19506 - protein, 44 aa, synthetic construct
GGGSGGGSGGGSGGGSGGGSGGGSGGGSGGGSGGGSGGGSGGGS

SEQ ID NO: 19507 - protein, 48 aa, synthetic construct
GGGSGGGSGGGSGGGSGGGSGGGSGGGSGGGSGGGSGGGSGGGSGGGS

SEQ ID NO: 19508 - protein, 52 aa, synthetic construct
GGGSGGGSGGGSGGGSGGGSGGGSGGGSGGGSGGGSGGGSGGGSGGGSGGGS

SEQ ID NO: 19509 - protein, 56 aa, synthetic construct
GGGSGGGSGGGSGGGSGGGSGGGSGGGSGGGSGGGSGGGSGGGSGGGSGGGSGGGS

SEQ ID NO: 19510 - protein, 60 aa, synthetic construct
GGGSGGGSGGGSGGGSGGGSGGGSGGGSGGGSGGGSGGGSGGGSGGGSGGGSGGGSGGGS

SEQ ID NO: 19511 - protein, 5 aa, synthetic construct
GGGGS

SEQ ID NO: 19512 - protein, 10 aa, synthetic construct
GGGGSGGGGS

SEQ ID NO: 19513 - protein, 15 aa, synthetic construct
GGGGSGGGGSGGGGS

SEQ ID NO: 19514 - protein, 20 aa, synthetic construct
GGGGSGGGGSGGGGSGGGGS

SEQ ID NO: 19515 - protein, 25 aa, synthetic construct
GGGGSGGGGSGGGGSGGGGSGGGGS

SEQ ID NO: 19516 - protein, 30 aa, synthetic construct
GGGGSGGGGSGGGGSGGGGSGGGGSGGGGS

SEQ ID NO: 19517 - protein, 35 aa, synthetic construct
GGGGSGGGGSGGGGSGGGGSGGGGSGGGGSGGGGS

SEQ ID NO: 19518 - protein, 40 aa, synthetic construct
GGGGSGGGGSGGGGSGGGGSGGGGSGGGGSGGGGSGGGGS

SEQ ID NO: 19519 - protein, 45 aa, synthetic construct
GGGGSGGGGSGGGGSGGGGSGGGGSGGGGSGGGGSGGGGSGGGGS

SEQ ID NO: 19520 - protein, 50 aa, synthetic construct
GGGGSGGGGSGGGGSGGGGSGGGGSGGGGSGGGGSGGGGSGGGGSGGGGS

SEQ ID NO: 19521 - protein, 55 aa, synthetic construct
GGGGSGGGGSGGGGSGGGGSGGGGSGGGGSGGGGSGGGGSGGGGSGGGGSGGGGS

SEQ ID NO: 19522 - protein, 60 aa, synthetic construct
GGGGSGGGGSGGGGSGGGGSGGGGSGGGGSGGGGSGGGGSGGGGSGGGGSGGGGSGGGGS

SEQ ID NO: 19523 - protein, 65 aa, synthetic construct
GGGGSGGGGSGGGGSGGGGSGGGGSGGGGSGGGGSGGGGSGGGGSGGGGSGGGGSGGGGSGGGGS

SEQ ID NO: 19524 - protein, 70 aa, synthetic construct
GGGGSGGGGSGGGGSGGGGSGGGGSGGGGSGGGGSGGGGSGGGGSGGGGSGGGGSGGGGSGGGGSGGGGS

SEQ ID NO: 19525 - protein, 75 aa, synthetic construct
GGGGSGGGGSGGGGSGGGGSGGGGSGGGGSGGGGSGGGGSGGGGSGGGGSGGGGSGGGGSGGGGSGGGGSGGGGS

SEQ ID NO: 19526 - protein, 32 aa, synthetic construct; identical to SEQ ID NO: 19418

SEQ ID NO: 19527 - DNA, 48 bp, synthetic construct
  source 1..48: mol_type = other DNA
tcgggatctgagacgcctgggacctcggaatcggctacgcccgaaagt

SEQ ID NO: 19528 - protein, 96 aa, synthetic construct
LEPGEKPYKCPECGKSFSQSGALTRHQRTHTRLEPGEKPYKCPECGKSFSQSGALTRHQRTHTRLEPGEKPYKCPECGKSFSQSGALTRHQRTHTR

SEQ ID NO: 19529 - protein, 16 aa, synthetic construct
KRPAATKKAGQAKKKK

SEQ ID NO: 19530 - protein, 9 aa, synthetic construct
PAAKRVKLD

SEQ ID NO: 19531 - protein, 11 aa, synthetic construct
RQRRNELKRSP

SEQ ID NO: 19532 - protein, 38 aa, synthetic construct
NQSSNFGPMKGGNFGGRSSGPYGGGGQYFAKPRNQGGY

SEQ ID NO: 19533 - protein, 42 aa, synthetic construct
RMRIZFKNKGKDTAELRRRRVEVSVELRKAKKDEQILKRRNV

SEQ ID NO: 19534 - protein, 8 aa, synthetic construct
PPKKARED

SEQ ID NO: 19535 - protein, 8 aa, Homo sapiens
PQPKKKPL

SEQ ID NO: 19536 - protein, 12 aa, Mus musculus
SALIKKKKKMAP

SEQ ID NO: 19537 - protein, 5 aa, unidentified
  source 1..5: note = Influenza virus NS 1
DRLRR

SEQ ID NO: 19538 - protein, 7 aa, unidentified
  source 1..7: note = Influenza virus NS 1
PKQKKRK

SEQ ID NO: 19539 - protein, 10 aa, unidentified
  source 1..10: note = Hepatitis virus
RKLKKKIKKL

SEQ ID NO: 19540 - protein, 10 aa, Mus musculus
REKKKFLKRR

SEQ ID NO: 19541 - protein, 20 aa, Homo sapiens
KRKGDEVDGVDEVAKKKSKK

SEQ ID NO: 19542 - protein, 17 aa, Homo sapiens
RICLQAGMNLEARITII

SEQ ID NO: 19543 - DNA, 245 bp, synthetic construct
  source 1..245: mol_type = other DNA
tataagcctttatgctgtggtgttgcgccacggtggagatttgtcaaatacacatcattaggttgcgacaaacggcagaagctggaggaggaagggcctgagtccgagcagaagaacctgcaggacctatcattcannnnnnnnaaagttctcccatcacatcaaccggtggcgcattgccacgaagcaggccaatggggaggacatcgatgtcacacaaccaaatataagaattgttagttata

SEQ ID NO: 19544 - DNA, 245 bp, synthetic construct
  source 1..245: mol_type = other DNA
tgatagcctttatgctgtggtgttgcgccacggtggagatttgtcaaatacacatcattaggttgcgacaaacggcagaagctggaggaggaagggcctgagtccgagcagaagaacctgcaggacctatcattcannnnnnnnaaagttctcccatcacatcaaccggtggcgcattgccacgaagcaggccaatggggaggacatcgatgtcacacaaccaaatataagaattgttagtatca

SEQ ID NO: 19545 - DNA, 245 bp, synthetic construct
  source 1..245: mol_type = other DNA
tctacgcctttatgctgtggtgttgcgccacggtggagatttgtcaaatacacatcattaggttgcgacaaacggcagaagctggaggaggaagggcctgagtccgagcagaagaacctgcaggacctatcattcannnnnnnnaaagttctcccatcacatcaaccggtggcgcattgccacgaagcaggccaatggggaggacatcgatgtcacacaaccaaatataagaattgttaggtaga

SEQ ID NO: 19546 - DNA, 245 bp, synthetic construct
  source 1..245: mol_type = other DNA
gatccgcctttatgctgtggtgttgcgccacggtggagatttgtcaaatacacatcattaggttgcgacaaacggcagaagctggaggaggaagggcctgagtccgagcagaagaacctgcaggacctatcattcannnnnnnnaaagttctcccatcacatcaaccggtggcgcattgccacgaagcaggccaatggggaggacatcgatgtcacacaaccaaatataagaattgttagggatc

SEQ ID NO: 19547 - DNA, 245 bp, synthetic construct
  source 1..245: mol_type = other DNA
acgcggcctttatgctgtggtgttgcgccacggtggagatttgtcaaatacacatcattaggttgcgacaaacggcagaagctggaggaggaagggcctgagtccgagcagaagaacctgcaggacctatcattcannnnnnnnaaagttctcccatcacatcaaccggtggcgcattgccacgaagcaggccaatggggaggacatcgatgtcacacaaccaaatataagaattgttagcgcgt

SEQ ID NO: 19548 - DNA, 245 bp, synthetic construct
  source 1..245: mol_type = other DNA
cgcgcgcctttatgctgtggtgttgcgccacggtggagatttgtcaaatacacatcattaggttgcgacaaacggcagaagctggaggaggaagggcctgagtccgagcagaagaacctgcaggacctatcattcannnnnnnnaaagttctcccatcacatcaaccggtggcgcattgccacgaagcaggccaatggggaggacatcgatgtcacacaaccaaatataagaattgttaggcgcg

SEQ ID NO: 19549 - DNA, 255 bp, synthetic construct
  source 1..255: mol_type = other DNA
tattaaatttgcctttatgctgtggtgttgcgccacggtggagatttgtcaaatacacatcattaggttgcgacaaacggcagaagctggaggaggaagggcctgagtccgagcagaagaacctgcaggacctatcattcannnnnnnnaaagttctcccatcacatcaaccggtggcgcattgccacgaagcaggccaatggggaggacatcgatgtcacacaaccaaatataagaattgttagaaatttaata

SEQ ID NO: 19550 - DNA, 255 bp, synthetic construct
  source 1..255: mol_type = other DNA
tataatacgagcctttatgctgtggtgttgcgccacggtggagatttgtcaaatacacatcattaggttgcgacaaacggcagaagctggaggaggaagggcctgagtccgagcagaagaacctgcaggacctatcattcannnnnnnnaaagttctcccatcacatcaaccggtggcgcattgccacgaagcaggccaatggggaggacatcgatgtcacacaaccaaatataagaattgttagtcgtattata

SEQ ID NO: 19551 - DNA, 255 bp, synthetic construct
  source 1..255: mol_type = other DNA
ttctgccaatgcctttatgctgtggtgttgcgccacggtggagatttgtcaaatacacatcattaggttgcgacaaacggcagaagctggaggaggaagggcctgagtccgagcagaagaacctgcaggacctatcattcannnnnnnnaaagttctcccatcacatcaaccggtggcgcattgccacgaagcaggccaatggggaggacatcgatgtcacacaaccaaatataagaattgttagattggcagaa

SEQ ID NO: 19552 - DNA, 255 bp, synthetic construct
  source 1..255: mol_type = other DNA
tctcctcgaggcctttatgctgtggtgttgcgccacggtggagatttgtcaaatacacatcattaggttgcgacaaacggcagaagctggaggaggaagggcctgagtccgagcagaagaacctgcaggacctatcattcannnnnnnnaaagttctcccatcacatcaaccggtggcgcattgccacgaagcaggccaatggggaggacatcgatgtcacacaaccaaatataagaattgttagctcgaggaga

SEQ ID NO: 19553 - DNA, 255 bp, synthetic construct
  source 1..255: mol_type = other DNA
ccgggttcgcgcctttatgctgtggtgttgcgccacggtggagatttgtcaaatacacatcattaggttgcgacaaacggcagaagctggaggaggaagggcctgagtccgagcagaagaacctgcaggacctatcattcannnnnnnnaaagttctcccatcacatcaaccggtggcgcattgccacgaagcaggccaatggggaggacatcgatgtcacacaaccaaatataagaattgttaggcgaacccgg

SEQ ID NO: 19554 - DNA, 255 bp, synthetic construct
  source 1..255: mol_type = other DNA
ggccgggcccgcctttatgctgtggtgttgcgccacggtggagatttgtcaaatacacatcattaggttgcgacaaacggcagaagctggaggaggaagggcctgagtccgagcagaagaacctgcaggacctatcattcannnnnnnnaaagttctcccatcacatcaaccggtggcgcattgccacgaagcaggccaatggggaggacatcgatgtcacacaaccaaatataagaattgttaggggcccggcc

SEQ ID NO: 19555 - DNA, 265 bp, synthetic construct
  source 1..265: mol_type = other DNA
aaatttaattataaagcctttatgctgtggtgttgcgccacggtggagatttgtcaaatacacatcattaggttgcgacaaacggcagaagctggaggaggaagggcctgagtccgagcagaagaacctgcaggacctatcattcannnnnnnnaaagttctcccatcacatcaaccggtggcgcattgccacgaagcaggccaatggggaggacatcgatgtcacacaaccaaatataagaattgttagtttataattaaattt

SEQ ID NO: 19556 - DNA, 265 bp, synthetic construct
  source 1..265: mol_type = other DNA
atattctattacttggcctttatgctgtggtgttgcgccacggtggagatttgtcaaatacacatcattaggttgcgacaaacggcagaagctggaggaggaagggcctgagtccgagcagaagaacctgcaggacctatcattcannnnnnnnaaagttctcccatcacatcaaccggtggcgcattgccacgaagcaggccaatggggaggacatcgatgtcacacaaccaaatataagaattgttagcaagtaatagaatat

SEQ ID NO: 19557 - DNA, 265 bp, synthetic construct
  source 1..265: mol_type = other DNA
gcgtatagtaatctggcctttatgctgtggtgttgcgccacggtggagatttgtcaaatacacatcattaggttgcgacaaacggcagaagctggaggaggaagggcctgagtccgagcagaagaacctgcaggacctatcattcannnnnnnnaaagttctcccatcacatcaaccggtggcgcattgccacgaagcaggccaatggggaggacatcgatgtcacacaaccaaatataagaattgttagcagattactatacgc

SEQ ID NO: 19558 - DNA, 265 bp, synthetic construct
  source 1..265: mol_type = other DNA
aacgcgaaacgctgggcctttatgctgtggtgttgcgccacggtggagatttgtcaaatacacatcattaggttgcgacaaacggcagaagctggaggaggaagggcctgagtccgagcagaagaacctgcaggacctatcattcannnnnnnnaaagttctcccatcacatcaaccggtggcgcattgccacgaagcaggccaatggggaggacatcgatgtcacacaaccaaatataagaattgttagccagcgtttcgcgtt

SEQ ID NO: 19559 - DNA, 265 bp, synthetic construct
  source 1..265: mol_type = other DNA
gaggcgggtgccgcagcctttatgctgtggtgttgcgccacggtggagatttgtcaaatacacatcattaggttgcgacaaacggcagaagctggaggaggaagggcctgagtccgagcagaagaacctgcaggacctatcattcannnnnnnnaaagttctcccatcacatcaaccggtggcgcattgccacgaagcaggccaatggggaggacatcgatgtcacacaaccaaatataagaattgttagtgcggcacccgcctc

SEQ ID NO: 19560 - DNA, 265 bp, synthetic construct
  source 1..265: mol_type = other DNA
gcggccgcgggcggggcctttatgctgtggtgttgcgccacggtggagatttgtcaaatacacatcattaggttgcgacaaacggcagaagctggaggaggaagggcctgagtccgagcagaagaacctgcaggacctatcattcannnnnnnnaaagttctcccatcacatcaaccggtggcgcattgccacgaagcaggccaatggggaggacatcgatgtcacacaaccaaatataagaattgttagcccgcccgcggccgc

SEQ ID NO: 19561 - DNA, 275 bp, synthetic construct
  source 1..275: mol_type = other DNA
aatattatattaaatattatgcctttatgctgtggtgttgcgccacggtggagatttgtcaaatacacatcattaggttgcgacaaacggcagaagctggaggaggaagggcctgagtccgagcagaagaacctgcaggacctatcattcannnnnnnnaaagttctcccatcacatcaaccggtggcgcattgccacgaagcaggccaatggggaggacatcgatgtcacacaaccaaatataagaattgttagataatatttaatataatatt

SEQ ID NO: 19562 - DNA, 275 bp, synthetic construct
  source 1..275: mol_type = other DNA
gaacaaactaaatataaatcgcctttatgctgtggtgttgcgccacggtggagatttgtcaaatacacatcattaggttgcgacaaacggcagaagctggaggaggaagggcctgagtccgagcagaagaacctgcaggacctatcattcannnnnnnnaaagttctcccatcacatcaaccggtggcgcattgccacgaagcaggccaatggggaggacatcgatgtcacacaaccaaatataagaattgttaggatttatatttagtttgttc

SEQ ID NO: 19563 - DNA, 275 bp, synthetic construct
  source 1..275: mol_type = other DNA
cgatttctaagacttcggtagcctttatgctgtggtgttgcgccacggtggagatttgtcaaatacacatcattaggttgcgacaaacggcagaagctggaggaggaagggcctgagtccgagcagaagaacctgcaggacctatcattcannnnnnnnaaagttctcccatcacatcaaccggtggcgcattgccacgaagcaggccaatggggaggacatcgatgtcacacaaccaaatataagaattgttagtaccgaagtcttagaaatcg

SEQ ID NO: 19564 - DNA, 275 bp, synthetic construct
  source 1..275: mol_type = other DNA
gtcagggaactccaggaggagcctttatgctgtggtgttgcgccacggtggagatttgtcaaatacacatcattaggttgcgacaaacggcagaagctggaggaggaagggcctgagtccgagcagaagaacctgcaggacctatcattcannnnnnnnaaagttctcccatcacatcaaccggtggcgcattgccacgaagcaggccaatggggaggacatcgatgtcacacaaccaaatataagaattgttagtcctcctggagttccctgac

SEQ ID NO: 19565 - DNA, 275 bp, synthetic construct
  source 1..275: mol_type = other DNA
cgtgggccgcgcttgagccggcctttatgctgtggtgttgcgccacggtggagatttgtcaaatacacatcattaggttgcgacaaacggcagaagctggaggaggaagggcctgagtccgagcagaagaacctgcaggacctatcattcannnnnnnnaaagttctcccatcacatcaaccggtggcgcattgccacgaagcaggccaatggggaggacatcgatgtcacacaaccaaatataagaattgttagcggctcaagcgcggcccacg

SEQ ID NO: 19566 - DNA, 275 bp, synthetic construct
  source 1..275: mol_type = other DNA
cggccgccggcgccggcgcggcctttatgctgtggtgttgcgccacggtggagatttgtcaaatacacatcattaggttgcgacaaacggcagaagctggaggaggaagggcctgagtccgagcagaagaacctgcaggacctatcattcannnnnnnnaaagttctcccatcacatcaaccggtggcgcattgccacgaagcaggccaatggggaggacatcgatgtcacacaaccaaatataagaattgttagcgcgccggcgccggcggccg

SEQ ID NO: 19567 - DNA, 285 bp, synthetic construct
  source 1..285: mol_type = other DNA
attaatatataaatttaattatatagcctttatgctgtggtgttgcgccacggtggagatttgtcaaatacacatcattaggttgcgacaaacggcagaagctggaggaggaagggcctgagtccgagcagaagaacctgcaggacctatcattcannnnnnnnaaagttctcccatcacatcaaccggtggcgcattgccacgaagcaggccaatggggaggacatcgatgtcacacaaccaaatataagaattgttagtatataattaaatttatatattaat

SEQ ID NO: 19568 - DNA, 285 bp, synthetic construct
  source 1..285: mol_type = other DNA
gttatactaataagaattatctgaagcctttatgctgtggtgttgcgccacggtggagatttgtcaaatacacatcattaggttgcgacaaacggcagaagctggaggaggaagggcctgagtccgagcagaagaacctgcaggacctatcattcannnnnnnnaaagttctcccatcacatcaaccggtggcgcattgccacgaagcaggccaatggggaggacatcgatgtcacacaaccaaatataagaattgttagttcagataattcttattagtataac

SEQ ID NO: 19569 - DNA, 285 bp, synthetic construct
  source 1..285: mol_type = other DNA
ttaagatagaggcacttctagtgaggcctttatgctgtggtgttgcgccacggtggagatttgtcaaatacacatcattaggttgcgacaaacggcagaagctggaggaggaagggcctgagtccgagcagaagaacctgcaggacctatcattcannnnnnnnaaagttctcccatcacatcaaccggtggcgcattgccacgaagcaggccaatggggaggacatcgatgtcacacaaccaaatataagaattgttagctcactagaagtgcctctatcttaa

SEQ ID NO: 19570 - DNA, 285 bp, synthetic construct
  source 1..285: mol_type = other DNA
caggcagcacgcacacagccgaaatgcctttatgctgtggtgttgcgccacggtggagatttgtcaaatacacatcattaggttgcgacaaacggcagaagctggaggaggaagggcctgagtccgagcagaagaacctgcaggacctatcattcannnnnnnnaaagttctcccatcacatcaaccggtggcgcattgccacgaagcaggccaatggggaggacatcgatgtcacacaaccaaatataagaattgttagatttcggctgtgtgcgtgctgcctg

SEQ ID NO: 19571 - DNA, 285 bp, synthetic construct
  source 1..285: mol_type = other DNA
caccactggcgccgccagcaggcgggcctttatgctgtggtgttgcgccacggtggagatttgtcaaatacacatcattaggttgcgacaaacggcagaagctggaggaggaagggcctgagtccgagcagaagaacctgcaggacctatcattcannnnnnnnaaagttctcccatcacatcaaccggtggcgcattgccacgaagcaggccaatggggaggacatcgatgtcacacaaccaaatataagaattgttagccgcctgctggcggcgccagtggtg

SEQ ID NO: 19572 - DNA, 285 bp, synthetic construct
  source 1..285: mol_type = other DNA
cgcggccgcgccgggcgcgcgcccggcctttatgctgtggtgttgcgccacggtggagatttgtcaaatacacatcattaggttgcgacaaacggcagaagctggaggaggaagggcctgagtccgagcagaagaacctgcaggacctatcattcannnnnnnnaaagttctcccatcacatcaaccggtggcgcattgccacgaagcaggccaatggggaggacatcgatgtcacacaaccaaatataagaattgttagcgggcgcgcgcccggcgcggccgcg

SEQ ID NO: 19573 - DNA, 295 bp, synthetic construct
  source 1..295: mol_type = other DNA
aataattattatataataatatattaataagcctttatgctgtggtgttgcgccacggtggagatttgtcaaatacacatcattaggttgcgacaaacggcagaagctggaggaggaagggcctgagtccgagcagaagaacctgcaggacctatcattcannnnnnnnaaagttctcccatcacatcaaccggtggcgcattgccacgaagcaggccaatggggaggacatcgatgtcacacaaccaaatataagaattgttagttattaatatattattatataataattatt

SEQ ID NO: 19574 - DNA, 295 bp, synthetic construct
  source 1..295: mol_type = other DNA
aataatataatcccttagtctattagtttagcctttatgctgtggtgttgcgccacggtggagatttgtcaaatacacatcattaggttgcgacaaacggcagaagctggaggaggaagggcctgagtccgagcagaagaacctgcaggacctatcattcannnnnnnnaaagttctcccatcacatcaaccggtggcgcattgccacgaagcaggccaatggggaggacatcgatgtcacacaaccaaatataagaattgttagtaaactaatagactaagggattatattatt

SEQ ID NO: 19575 - DNA, 295 bp, synthetic construct
  source 1..295: mol_type = other DNA
taatttacaggacagggactttactcgatcgcctttatgctgtggtgttgcgccacggtggagatttgtcaaatacacatcattaggttgcgacaaacggcagaagctggaggaggaagggcctgagtccgagcagaagaacctgcaggacctatcattcannnnnnnnaaagttctcccatcacatcaaccggtggcgcattgccacgaagcaggccaatggggaggacatcgatgtcacacaaccaaatataagaattgttaggatcgagtaaagtccctgtcctgtaaatta

SEQ ID NO: 19576 - DNA, 295 bp, synthetic construct
  source 1..295: mol_type = other DNA
tatctggcaacggccagagagagcgcctgagcctttatgctgtggtgttgcgccacggtggagatttgtcaaatacacatcattaggttgcgacaaacggcagaagctggaggaggaagggcctgagtccgagcagaagaacctgcaggacctatcattcannnnnnnnaaagttctcccatcacatcaaccggtggcgcattgccacgaagcaggccaatggggaggacatcgatgtcacacaaccaaatataagaattgttagtcaggcgctctctctggccgttgccagata

SEQ ID NO: 19577 - DNA, 295 bp, synthetic construct
  source 1..295: mol_type = other DNA
gccgtcccgcgcggcctgcccaaacgccctgcctttatgctgtggtgttgcgccacggtggagatttgtcaaatacacatcattaggttgcgacaaacggcagaagctggaggaggaagggcctgagtccgagcagaagaacctgcaggacctatcattcannnnnnnnaaagttctcccatcacatcaaccggtggcgcattgccacgaagcaggccaatggggaggacatcgatgtcacacaaccaaatataagaattgttagagggcgtttgggcaggccgcgcgggacggc

SEQ ID NO: 19578 - DNA, 295 bp, synthetic construct
  source 1..295: mol_type = other DNA
cgccgccggccgggcgcgggcgccggcggcgcctttatgctgtggtgttgcgccacggtggagatttgtcaaatacacatcattaggttgcgacaaacggcagaagctggaggaggaagggcctgagtccgagcagaagaacctgcaggacctatcattcannnnnnnnaaagttctcccatcacatcaaccggtggcgcattgccacgaagcaggccaatggggaggacatcgatgtcacacaaccaaatataagaattgttaggccgccggcgcccgcgcccggccggcggcg

SEQ ID NO: 19579 - DNA, 305 bp, synthetic construct
  source 1..305: mol_type = other DNA
aatatatataaatattaataataatattaataaatgcctttatgctgtggtgttgcgccacggtggagatttgtcaaatacacatcattaggttgcgacaaacggcagaagctggaggaggaagggcctgagtccgagcagaagaacctgcaggacctatcattcannnnnnnnaaagttctcccatcacatcaaccggtggcgcattgccacgaagcaggccaatggggaggacatcgatgtcacacaaccaaatataagaattgttagatttattaatattattattaatatttatatatatt

SEQ ID NO: 19580 - DNA, 305 bp, synthetic construct
  source 1..305: mol_type = other DNA
ttaatatctaacaattattgaagttgctttatttcgcctttatgctgtggtgttgcgccacggtggagatttgtcaaatacacatcattaggttgcgacaaacggcagaagctggaggaggaagggcctgagtccgagcagaagaacctgcaggacctatcattcannnnnnnnaaagttctcccatcacatcaaccggtggcgcattgccacgaagcaggccaatggggaggacatcgatgtcacacaaccaaatataagaattgttaggaaataaagcaacttcaataattgttagatattaa

SEQ ID NO: 19581 - DNA, 305 bp, synthetic construct
  source 1..305: mol_type = other DNA
cagttatagcgcgaactagtttgacctgatttgtagcctttatgctgtggtgttgcgccacggtggagatttgtcaaatacacatcattaggttgcgacaaacggcagaagctggaggaggaagggcctgagtccgagcagaagaacctgcaggacctatcattcannnnnnnnaaagttctcccatcacatcaaccggtggcgcattgccacgaagcaggccaatggggaggacatcgatgtcacacaaccaaatataagaattgttagtacaaatcaggtcaaactagttcgcgctataactg

SEQ ID NO: 19582 - DNA, 305 bp, synthetic construct
  source 1..305: mol_type = other DNA
atagactggccgcccgtaggaacttgaggacgcacgcctttatgctgtggtgttgcgccacggtggagatttgtcaaatacacatcattaggttgcgacaaacggcagaagctggaggaggaagggcctgagtccgagcagaagaacctgcaggacctatcattcannnnnnnnaaagttctcccatcacatcaaccggtggcgcattgccacgaagcaggccaatggggaggacatcgatgtcacacaaccaaatataagaattgttaggtgcgtcctcaagttcctacgggcggccagtctat

SEQ ID NO: 19583 - DNA, 305 bp, synthetic construct
  source 1..305: mol_type = other DNA
gcgagcgcgaggacgccacgagcacgcgccctgccgcctttatgctgtggtgttgcgccacggtggagatttgtcaaatacacatcattaggttgcgacaaacggcagaagctggaggaggaagggcctgagtccgagcagaagaacctgcaggacctatcattcannnnnnnnaaagttctcccatcacatcaaccggtggcgcattgccacgaagcaggccaatggggaggacatcgatgtcacacaaccaaatataagaattgttagggcagggcgcgtgctcgtggcgtcctcgcgctcgc

SEQ ID NO: 19584 - DNA, 305 bp, synthetic construct
  source 1..305: mol_type = other DNA
cggccggcgcccgggccgggcgggcccgcgggcgggcctttatgctgtggtgttgcgccacggtggagatttgtcaaatacacatcattaggttgcgacaaacggcagaagctggaggaggaagggcctgagtccgagcagaagaacctgcaggacctatcattcannnnnnnnaaagttctcccatcacatcaaccggtggcgcattgccacgaagcaggccaatggggaggacatcgatgtcacacaaccaaatataagaattgttagccgcccgcgggcccgcccggcccgggcgccggccg

SEQ ID NO: 19585 - DNA, 249 bp, synthetic construct
  source 1..249: mol_type = other DNA
catagaggcctttatgctgtggtgttgcgccacggtggagatttgtcaaatacacatcattaggttgcgacaaacggcagaagctggaggaggaagggcctgagtccgagcagaagaacctgcaggacctatcattcannnnnnnnaaagttctcccatcacatcaaccggtggcgcattgccacgaagcaggccaatggggaggacatcgatgtcacacaaccaaatataagaattgttagctctatg

SEQ ID NO: 19586 - DNA, 316 bp, synthetic construct
  source 1..316: mol_type = other DNA
catagatttcttggcctttatgctgtggtgttgcgccacggtggagatttgtcaaatacacatcattaggttgcgcgcaattcgctacgctaccaatactgtgacaaacggcagaagctggaggaggaagggcctgagtccgagcagaagaacctgcaggacctatcattcannnnnnnnaaagttctcccatcacatcaaccggtggcgcattgccacgaagcaggccaatggggaggacatcgatgtcacacagtattggtgctacgctgaagtgtcacaaccaaatataagaattgttagcaagaaatctatg

SEQ ID NO: 19587 - DNA, 306 bp, synthetic construct
  source 1..306: mol_type = other DNA
catagatttcttggcctttatgctgtggtgttgcgccacggtggagatttgtcaaatacacatcattaggttgcgcgcaattcgctacgctaccaataacaaacggcagaagctggaggaggaagggcctgagtccgagcagaagaacctgcaggacctatcattcannnnnnnnaaagttctcccatcacatcaaccggtggcgcattgccacgaagcaggccaatggggaggacatcgatgtcatattggtgctacgctgaagtgtcacaaccaaatataagaattgttagcaagaaatctatg

SEQ ID NO: 19588 - DNA, 296 bp, synthetic construct
  source 1..296: mol_type = other DNA
catagatttcttggcctttatgctgtggtgttgcgccacggtggagatttgtcaaatacacatcattaggttgcgcgcaattcgctacgctacacaaacggcagaagctggaggaggaagggcctgagtccgagcagaagaacctgcaggacctatcattcannnnnnnnaaagttctcccatcacatcaaccggtggcgcattgccacgaagcaggccaatggggaggacatcgatgtcagtgctacgctgaagtgtcacaaccaaatataagaattgttagcaagaaatctatg

SEQ ID NO: 19589 - DNA, 287 bp, synthetic construct
  source 1..287: mol_type = other DNA
catagatttcttggcctttatgctgtggtgttgcgccacggtggagatttgtcaaatacacatcattaggttgcgcgcaattcgctacacaaacggcagaagctggaggaggaagggcctgagtccgagcagaagaacctgcaggacctatcattcannnnnnnnaaagttctcccatcacatcaaccggtggcgcattgccacgaagcaggccaatggggaggacatcgatgtcatacgctgaagtgtcacaaccaaatataagaattgttagcaagaaatctatg

SEQ ID NO: 19590 - DNA, 276 bp, synthetic construct
  source 1..276: mol_type = other DNA
catagatttcttggcctttatgctgtggtgttgcgccacggtggagatttgtcaaatacacatcattaggttgcgcgcaattcacaaacggcagaagctggaggaggaagggcctgagtccgagcagaagaacctgcaggacctatcattcannnnnnnnaaagttctcccatcacatcaaccggtggcgcattgccacgaagcaggccaatggggaggacatcgatgtcagaagtgtcacaaccaaatataagaattgttagcaagaaatctatg

SEQ ID NO: 19591 - DNA, 268 bp, synthetic construct
  source 1..268: mol_type = other DNA
catagatttcttggcctttatgctgtggtgttgcgccacggtggagatttgtcaaatacacatcattaggttgcgcgcacaaacggcagaagctggaggaggaagggcctgagtccgagcagaagaacctgcaggacctatcattcannnnnnnnaaagttctcccatcacatcaaccggtggcgcattgccacgaagcaggccaatggggaggacatcgatgtcagtgtcacaaccaaatataagaattgttagcaagaaatctatg

SEQ ID NO: 19592 - DNA, 257 bp, synthetic construct
  source 1..257: mol_type = other DNA
catagatttcttggcctttatgctgtggtgttgcgccacggtggagatttgtcaaatacacatcattaggttgacaaacggcagaagctggaggaggaagggcctgagtccgagcagaagaacctgcaggacctatcattcannnnnnnnaaagttctcccatcacatcaaccggtggcgcattgccacgaagcaggccaatggggaggacatcgatgtcacaaccaaatataagaattgttagcaagaaatctatg

SEQ ID NO: 19593 - DNA, 257 bp, synthetic construct
  source 1..257: mol_type = other DNA
catagatttcttggcctttatgctgtggtgttgcgccacggtggagatttgtcaaatacacatcattatataaacaaacggcagaagctggaggaggaagggcctgagtccgagcagaagaacctgcaggacctatcattcannnnnnnnaaagttctcccatcacatcaaccggtggcgcattgccacgaagcaggccaatggggaggacatcgatgtcattataaaatataagaattgttagcaagaaatctatg

SEQ ID NO: 19594 - DNA, 257 bp, synthetic construct
  source 1..257: mol_type = other DNA
catagatttcttggcctttatgctgtggtgttgcgccacggtggagatttgtcaaatacacatcattatgataacaaacggcagaagctggaggaggaagggcctgagtccgagcagaagaacctgcaggacctatcattcannnnnnnnaaagttctcccatcacatcaaccggtggcgcattgccacgaagcaggccaatggggaggacatcgatgtcatatcaaaatataagaattgttagcaagaaatctatg

SEQ ID NO: 19595 - DNA, 257 bp, synthetic construct
  source 1..257: mol_type = other DNA
catagatttcttggcctttatgctgtggtgttgcgccacggtggagatttgtcaaatacacatcattatctacacaaacggcagaagctggaggaggaagggcctgagtccgagcagaagaacctgcaggacctatcattcannnnnnnnaaagttctcccatcacatcaaccggtggcgcattgccacgaagcaggccaatggggaggacatcgatgtcagtagaaaatataagaattgttagcaagaaatctatg

SEQ ID NO: 19596 - DNA, 257 bp, synthetic construct
  source 1..257: mol_type = other DNA
catagatttcttggcctttatgctgtggtgttgcgccacggtggagatttgtcaaatacacatcattagatccacaaacggcagaagctggaggaggaagggcctgagtccgagcagaagaacctgcaggacctatcattcannnnnnnnaaagttctcccatcacatcaaccggtggcgcattgccacgaagcaggccaatggggaggacatcgatgtcaggatcaaatataagaattgttagcaagaaatctatg

SEQ ID NO: 19597 - DNA, 257 bp, synthetic construct
  source 1..257: mol_type = other DNA
catagatttcttggcctttatgctgtggtgttgcgccacggtggagatttgtcaaatacacatcattaacgcgacaaacggcagaagctggaggaggaagggcctgagtccgagcagaagaacctgcaggacctatcattcannnnnnnnaaagttctcccatcacatcaaccggtggcgcattgccacgaagcaggccaatggggaggacatcgatgtcacgcgtaaatataagaattgttagcaagaaatctatg

SEQ ID NO: 19598 - DNA, 257 bp, synthetic construct
  source 1..257: mol_type = other DNA
catagatttcttggcctttatgctgtggtgttgcgccacggtggagatttgtcaaatacacatcattacgcgcacaaacggcagaagctggaggaggaagggcctgagtccgagcagaagaacctgcaggacctatcattcannnnnnnnaaagttctcccatcacatcaaccggtggcgcattgccacgaagcaggccaatggggaggacatcgatgtcagcgcgaaatataagaattgttagcaagaaatctatg

SEQ ID NO: 19599 - DNA, 267 bp, synthetic construct
  source 1..267: mol_type = other DNA
catagatttcttggcctttatgctgtggtgttgcgccacggtggagatttgtcaaatacacatcattatattaaatttacaaacggcagaagctggaggaggaagggcctgagtccgagcagaagaacctgcaggacctatcattcannnnnnnnaaagttctcccatcacatcaaccggtggcgcattgccacgaagcaggccaatggggaggacatcgatgtcaaaatttaataaaatataagaattgttagcaagaaatctatg

SEQ ID NO: 19600 - DNA, 267 bp, synthetic construct
  source 1..267: mol_type = other DNA
catagatttcttggcctttatgctgtggtgttgcgccacggtggagatttgtcaaatacacatcattatataatacgaacaaacggcagaagctggaggaggaagggcctgagtccgagcagaagaacctgcaggacctatcattcannnnnnnnaaagttctcccatcacatcaaccggtggcgcattgccacgaagcaggccaatggggaggacatcgatgtcatcgtattataaaatataagaattgttagcaagaaatctatg

SEQ ID NO: 19601 - DNA, 267 bp, synthetic construct
  source 1..267: mol_type = other DNA
catagatttcttggcctttatgctgtggtgttgcgccacggtggagatttgtcaaatacacatcattattctgccaatacaaacggcagaagctggaggaggaagggcctgagtccgagcagaagaacctgcaggacctatcattcannnnnnnnaaagttctcccatcacatcaaccggtggcgcattgccacgaagcaggccaatggggaggacatcgatgtcaattggcagaaaaatataagaattgttagcaagaaatctatg

SEQ ID NO: 19602 - DNA, 267 bp, synthetic construct
  source 1..267: mol_type = other DNA
catagatttcttggcctttatgctgtggtgttgcgccacggtggagatttgtcaaatacacatcattatctcctcgagacaaacggcagaagctggaggaggaagggcctgagtccgagcagaagaacctgcaggacctatcattcannnnnnnnaaagttctcccatcacatcaaccggtggcgcattgccacgaagcaggccaatggggaggacatcgatgtcactcgaggagaaaatataagaattgttagcaagaaatctatg

SEQ ID NO: 19603 - DNA, 267 bp, synthetic construct
  source 1..267: mol_type = other DNA
catagatttcttggcctttatgctgtggtgttgcgccacggtggagatttgtcaaatacacatcattaccgggttcgcacaaacggcagaagctggaggaggaagggcctgagtccgagcagaagaacctgcaggacctatcattcannnnnnnnaaagttctcccatcacatcaaccggtggcgcattgccacgaagcaggccaatggggaggacatcgatgtcagcgaacccggaaatataagaattgttagcaagaaatctatg

SEQ ID NO: 19604 - DNA, 267 bp, synthetic construct
  source 1..267: mol_type = other DNA
catagatttcttggcctttatgctgtggtgttgcgccacggtggagatttgtcaaatacacatcattaggccgggcccacaaacggcagaagctggaggaggaagggcctgagtccgagcagaagaacctgcaggacctatcattcannnnnnnnaaagttctcccatcacatcaaccggtggcgcattgccacgaagcaggccaatggggaggacatcgatgtcagggcccggccaaatataagaattgttagcaagaaatctatg

SEQ ID NO: 19605 - DNA, 277 bp, synthetic construct
  source 1..277: mol_type = other DNA
catagatttcttggcctttatgctgtggtgttgcgccacggtggagatttgtcaaatacacatcattaaaatttaattataaaacaaacggcagaagctggaggaggaagggcctgagtccgagcagaagaacctgcaggacctatcattcannnnnnnnaaagttctcccatcacatcaaccggtggcgcattgccacgaagcaggccaatggggaggacatcgatgtcatttataattaaatttaaatataagaattgttagcaagaaatctatg

SEQ ID NO: 19606 - DNA, 277 bp, synthetic construct
  source 1..277: mol_type = other DNA
catagatttcttggcctttatgctgtggtgttgcgccacggtggagatttgtcaaatacacatcattaatattctattacttgacaaacggcagaagctggaggaggaagggcctgagtccgagcagaagaacctgcaggacctatcattcannnnnnnnaaagttctcccatcacatcaaccggtggcgcattgccacgaagcaggccaatggggaggacatcgatgtcacaagtaatagaatataaatataagaattgttagcaagaaatctatg

SEQ ID NO: 19607 - DNA, 277 bp, synthetic construct
  source 1..277: mol_type = other DNA
catagatttcttggcctttatgctgtggtgttgcgccacggtggagatttgtcaaatacacatcattagcgtatagtaatctgacaaacggcagaagctggaggaggaagggcctgagtccgagcagaagaacctgcaggacctatcattcannnnnnnnaaagttctcccatcacatcaaccggtggcgcattgccacgaagcaggccaatggggaggacatcgatgtcacagattactatacgcaaatataagaattgttagcaagaaatctatg

SEQ ID NO: 19608 - DNA, 277 bp, synthetic construct
  source 1..277: mol_type = other DNA
catagatttcttggcctttatgctgtggtgttgcgccacggtggagatttgtcaaatacacatcattaaacgcgaaacgctggacaaacggcagaagctggaggaggaagggcctgagtccgagcagaagaacctgcaggacctatcattcannnnnnnnaaagttctcccatcacatcaaccggtggcgcattgccacgaagcaggccaatggggaggacatcgatgtcaccagcgtttcgcgttaaatataagaattgttagcaagaaatctatg

SEQ ID NO: 19609 - DNA, 277 bp, synthetic construct
  source 1..277: mol_type = other DNA
catagatttcttggcctttatgctgtggtgttgcgccacggtggagatttgtcaaatacacatcattagaggcgggtgccgcaacaaacggcagaagctggaggaggaagggcctgagtccgagcagaagaacctgcaggacctatcattcannnnnnnnaaagttctcccatcacatcaaccggtggcgcattgccacgaagcaggccaatggggaggacatcgatgtcatgcggcacccgcctcaaatataagaattgttagcaagaaatctatg

SEQ ID NO: 19610 - DNA, 277 bp, synthetic construct
  source 1..277: mol_type = other DNA
catagatttcttggcctttatgctgtggtgttgcgccacggtggagatttgtcaaatacacatcattagcggccgcgggcgggacaaacggcagaagctggaggaggaagggcctgagtccgagcagaagaacctgcaggacctatcattcannnnnnnnaaagttctcccatcacatcaaccggtggcgcattgccacgaagcaggccaatggggaggacatcgatgtcacccgcccgcggccgcaaatataagaattgttagcaagaaatctatg

SEQ ID NO: 19611 - DNA, 287 bp, synthetic construct
  source 1..287: mol_type = other DNA
catagatttcttggcctttatgctgtggtgttgcgccacggtggagatttgtcaaatacacatcattaaatattatattaaatattatacaaacggcagaagctggaggaggaagggcctgagtccgagcagaagaacctgcaggacctatcattcannnnnnnnaaagttctcccatcacatcaaccggtggcgcattgccacgaagcaggccaatggggaggacatcgatgtcaataatatttaatataatattaaatataagaattgttagcaagaaatctatg

SEQ ID NO: 19612 - DNA, 287 bp, synthetic construct
  source 1..287: mol_type = other DNA
catagatttcttggcctttatgctgtggtgttgcgccacggtggagatttgtcaaatacacatcattagaacaaactaaatataaatcacaaacggcagaagctggaggaggaagggcctgagtccgagcagaagaacctgcaggacctatcattcannnnnnnnaaagttctcccatcacatcaaccggtggcgcattgccacgaagcaggccaatggggaggacatcgatgtcagatttatatttagtttgttcaaatataagaattgttagcaagaaatctatg

SEQ ID NO: 19613 - DNA, 287 bp, synthetic construct
  source 1..287: mol_type = other DNA
catagatttcttggcctttatgctgtggtgttgcgccacggtggagatttgtcaaatacacatcattacgatttctaagacttcggtaacaaacggcagaagctggaggaggaagggcctgagtccgagcagaagaacctgcaggacctatcattcannnnnnnnaaagttctcccatcacatcaaccggtggcgcattgccacgaagcaggccaatggggaggacatcgatgtcataccgaagtcttagaaatcgaaatataagaattgttagcaagaaatctatg

SEQ ID NO: 19614 - DNA, 287 bp, synthetic construct
  source 1..287: mol_type = other DNA
catagatttcttggcctttatgctgtggtgttgcgccacggtggagatttgtcaaatacacatcattagtcagggaactccaggaggaacaaacggcagaagctggaggaggaagggcctgagtccgagcagaagaacctgcaggacctatcattcannnnnnnnaaagttctcccatcacatcaaccggtggcgcattgccacgaagcaggccaatggggaggacatcgatgtcatcctcctggagttccctgacaaatataagaattgttagcaagaaatctatg

SEQ ID NO: 19615 - DNA, 287 bp, synthetic construct
  source 1..287: mol_type = other DNA
catagatttcttggcctttatgctgtggtgttgcgccacggtggagatttgtcaaatacacatcattacgtgggccgcgcttgagccgacaaacggcagaagctggaggaggaagggcctgagtccgagcagaagaacctgcaggacctatcattcannnnnnnnaaagttctcccatcacatcaaccggtggcgcattgccacgaagcaggccaatggggaggacatcgatgtcacggctcaagcgcggcccacgaaatataagaattgttagcaagaaatctatg

SEQ ID NO: 19616 - DNA, 287 bp, synthetic construct
  source 1..287: mol_type = other DNA
catagatttcttggcctttatgctgtggtgttgcgccacggtggagatttgtcaaatacacatcattacggccgccggcgccggcgcgacaaacggcagaagctggaggaggaagggcctgagtccgagcagaagaacctgcaggacctatcattcannnnnnnnaaagttctcccatcacatcaaccggtggcgcattgccacgaagcaggccaatggggaggacatcgatgtcacgcgccggcgccggcggccgaaatataagaattgttagcaagaaatctatg

SEQ ID NO: 19617 - DNA, 297 bp, synthetic construct
  source 1..297: mol_type = other DNA
catagatttcttggcctttatgctgtggtgttgcgccacggtggagatttgtcaaatacacatcattaattaatatataaatttaattatataacaaacggcagaagctggaggaggaagggcctgagtccgagcagaagaacctgcaggacctatcattcannnnnnnnaaagttctcccatcacatcaaccggtggcgcattgccacgaagcaggccaatggggaggacatcgatgtcatatataattaaatttatatattaataaatataagaattgttagcaagaaatctatg

SEQ ID NO: 19618 - DNA, 297 bp, synthetic construct
  source 1..297: mol_type = other DNA
catagatttcttggcctttatgctgtggtgttgcgccacggtggagatttgtcaaatacacatcattagttatactaataagaattatctgaaacaaacggcagaagctggaggaggaagggcctgagtccgagcagaagaacctgcaggacctatcattcannnnnnnnaaagttctcccatcacatcaaccggtggcgcattgccacgaagcaggccaatggggaggacatcgatgtcattcagataattcttattagtataacaaatataagaattgttagcaagaaatctatg

SEQ ID NO: 19619 - DNA, 297 bp, synthetic construct
  source 1..297: mol_type = other DNA
catagatttcttggcctttatgctgtggtgttgcgccacggtggagatttgtcaaatacacatcattattaagatagaggcacttctagtgagacaaacggcagaagctggaggaggaagggcctgagtccgagcagaagaacctgcaggacctatcattcannnnnnnnaaagttctcccatcacatcaaccggtggcgcattgccacgaagcaggccaatggggaggacatcgatgtcactcactagaagtgcctctatcttaaaaatataagaattgttagcaagaaatctatg

SEQ ID NO: 19620 - DNA, 297 bp, synthetic construct
  source 1..297: mol_type = other DNA
catagatttcttggcctttatgctgtggtgttgcgccacggtggagatttgtcaaatacacatcattacaggcagcacgcacacagccgaaatacaaacggcagaagctggaggaggaagggcctgagtccgagcagaagaacctgcaggacctatcattcannnnnnnnaaagttctcccatcacatcaaccggtggcgcattgccacgaagcaggccaatggggaggacatcgatgtcaatttcggctgtgtgcgtgctgcctgaaatataagaattgttagcaagaaatctatg

SEQ ID NO: 19621 - DNA, 297 bp, synthetic construct
  source 1..297: mol_type = other DNA
catagatttcttggcctttatgctgtggtgttgcgccacggtggagatttgtcaaatacacatcattacaccactggcgccgccagcaggcggacaaacggcagaagctggaggaggaagggcctgagtccgagcagaagaacctgcaggacctatcattcannnnnnnnaaagttctcccatcacatcaaccggtggcgcattgccacgaagcaggccaatggggaggacatcgatgtcaccgcctgctggcggcgccagtggtgaaatataagaattgttagcaagaaatctatg

SEQ ID NO: 19622 - DNA, 297 bp, synthetic construct
  source 1..297: mol_type = other DNA
catagatttcttggcctttatgctgtggtgttgcgccacggtggagatttgtcaaatacacatcattacgcggccgcgccgggcgcgcgcccgacaaacggcagaagctggaggaggaagggcctgagtccgagcagaagaacctgcaggacctatcattcannnnnnnnaaagttctcccatcacatcaaccggtggcgcattgccacgaagcaggccaatggggaggacatcgatgtcacgggcgcgcgcccggcgcggccgcgaaatataagaattgttagcaagaaatctatg

SEQ ID NO: 19623 - DNA, 307 bp, synthetic construct
  source 1..307: mol_type = other DNA
catagatttcttggcctttatgctgtggtgttgcgccacggtggagatttgtcaaatacacatcattaaataattattatataataatatattaataaacaaacggcagaagctggaggaggaagggcctgagtccgagcagaagaacctgcaggacctatcattcannnnnnnnaaagttctcccatcacatcaaccggtggcgcattgccacgaagcaggccaatggggaggacatcgatgtcattattaatatattattatataataattattaaatataagaattgttagcaagaaatctatg

SEQ ID NO: 19624 - DNA, 307 bp, synthetic construct
  source 1..307: mol_type = other DNA
catagatttcttggcctttatgctgtggtgttgcgccacggtggagatttgtcaaatacacatcattaaataatataatcccttagtctattagtttaacaaacggcagaagctggaggaggaagggcctgagtccgagcagaagaacctgcaggacctatcattcannnnnnnnaaagttctcccatcacatcaaccggtggcgcattgccacgaagcaggccaatggggaggacatcgatgtcataaactaatagactaagggattatattattaaatataagaattgttagcaagaaatctatg

SEQ ID NO: 19625 - DNA, 307 bp, synthetic construct
  source 1..307: mol_type = other DNA
catagatttcttggcctttatgctgtggtgttgcgccacggtggagatttgtcaaatacacatcattataatttacaggacagggactttactcgatcacaaacggcagaagctggaggaggaagggcctgagtccgagcagaagaacctgcaggacctatcattcannnnnnnnaaagttctcccatcacatcaaccggtggcgcattgccacgaagcaggccaatggggaggacatcgatgtcagatcgagtaaagtccctgtcctgtaaattaaaatataagaattgttagcaagaaatctatg

SEQ ID NO: 19626 - DNA, 307 bp, synthetic construct
  source 1..307: mol_type = other DNA
catagatttcttggcctttatgctgtggtgttgcgccacggtggagatttgtcaaatacacatcattatatctggcaacggccagagagagcgcctgaacaaacggcagaagctggaggaggaagggcctgagtccgagcagaagaacctgcaggacctatcattcannnnnnnnaaagttctcccatcacatcaaccggtggcgcattgccacgaagcaggccaatggggaggacatcgatgtcatcaggcgctctctctggccgttgccagataaaatataagaattgttagcaagaaatctatg

SEQ ID NO: 19627 - DNA, 307 bp, synthetic construct
  source 1..307: mol_type = other DNA
catagatttcttggcctttatgctgtggtgttgcgccacggtggagatttgtcaaatacacatcattagccgtcccgcgcggcctgcccaaacgccctacaaacggcagaagctggaggaggaagggcctgagtccgagcagaagaacctgcaggacctatcattcannnnnnnnaaagttctcccatcacatcaaccggtggcgcattgccacgaagcaggccaatggggaggacatcgatgtcaagggcgtttgggcaggccgcgcgggacggcaaatataagaattgttagcaagaaatctatg

SEQ ID NO: 19628 - DNA, 307 bp, synthetic construct
  source 1..307: mol_type = other DNA
catagatttcttggcctttatgctgtggtgttgcgccacggtggagatttgtcaaatacacatcattacgccgccggccgggcgcgggcgccggcggcacaaacggcagaagctggaggaggaagggcctgagtccgagcagaagaacctgcaggacctatcattcannnnnnnnaaagttctcccatcacatcaaccggtggcgcattgccacgaagcaggccaatggggaggacatcgatgtcagccgccggcgcccgcgcccggccggcggcgaaatataagaattgttagcaagaaatctatg

SEQ ID NO: 19629 - DNA, 317 bp, synthetic construct
  source 1..317: mol_type = other DNA
catagatttcttggcctttatgctgtggtgttgcgccacggtggagatttgtcaaatacacatcattaaatatatataaatattaataataatattaataaatacaaacggcagaagctggaggaggaagggcctgagtccgagcagaagaacctgcaggacctatcattcannnnnnnnaaagttctcccatcacatcaaccggtggcgcattgccacgaagcaggccaatggggaggacatcgatgtcaatttattaatattattattaatatttatatatattaaatataagaattgttagcaagaaatctatg

SEQ ID NO: 19630 - DNA, 317 bp, synthetic construct
  source 1..317: mol_type = other DNA
catagatttcttggcctttatgctgtggtgttgcgccacggtggagatttgtcaaatacacatcattattaatatctaacaattattgaagttgctttatttcacaaacggcagaagctggaggaggaagggcctgagtccgagcagaagaacctgcaggacctatcattcannnnnnnnaaagttctcccatcacatcaaccggtggcgcattgccacgaagcaggccaatggggaggacatcgatgtcagaaataaagcaacttcaataattgttagatattaaaaatataagaattgttagcaagaaatctatg

SEQ ID NO: 19631 - DNA, 317 bp, synthetic construct
  source 1..317: mol_type = other DNA
catagatttcttggcctttatgctgtggtgttgcgccacggtggagatttgtcaaatacacatcattacagttatagcgcgaactagtttgacctgatttgtaacaaacggcagaagctggaggaggaagggcctgagtccgagcagaagaacctgcaggacctatcattcannnnnnnnaaagttctcccatcacatcaaccggtggcgcattgccacgaagcaggccaatggggaggacatcgatgtcatacaaatcaggtcaaactagttcgcgctataactgaaatataagaattgttagcaagaaatctatg

SEQ ID NO: 19632 - DNA, 317 bp, synthetic construct
  source 1..317: mol_type = other DNA
catagatttcttggcctttatgctgtggtgttgcgccacggtggagatttgtcaaatacacatcattaatagactggccgcccgtaggaacttgaggacgcacacaaacggcagaagctggaggaggaagggcctgagtccgagcagaagaacctgcaggacctatcattcannnnnnnnaaagttctcccatcacatcaaccggtggcgcattgccacgaagcaggccaatggggaggacatcgatgtcagtgcgtcctcaagttcctacgggcggccagtctataaatataagaattgttagcaagaaatctatg

SEQ ID NO: 19633 - DNA, 317 bp, synthetic construct
  source 1..317: mol_type = other DNA
catagatttcttggcctttatgctgtggtgttgcgccacggtggagatttgtcaaatacacatcattagcgagcgcgaggacgccacgagcacgcgccctgccacaaacggcagaagctggaggaggaagggcctgagtccgagcagaagaacctgcaggacctatcattcannnnnnnnaaagttctcccatcacatcaaccggtggcgcattgccacgaagcaggccaatggggaggacatcgatgtcaggcagggcgcgtgctcgtggcgtcctcgcgctcgcaaatataagaattgttagcaagaaatctatg

SEQ ID NO: 19634 - DNA, 317 bp, synthetic construct
  source 1..317: mol_type = other DNA
catagatttcttggcctttatgctgtggtgttgcgccacggtggagatttgtcaaatacacatcattacggccggcgcccgggccgggcgggcccgcgggcggacaaacggcagaagctggaggaggaagggcctgagtccgagcagaagaacctgcaggacctatcattcannnnnnnnaaagttctcccatcacatcaaccggtggcgcattgccacgaagcaggccaatggggaggacatcgatgtcaccgcccgcgggcccgcccggcccgggcgccggccgaaatataagaattgttagcaagaaatctatg

SEQ ID NO: 19635 - DNA, 261 bp, synthetic construct
  source 1..261: mol_type = other DNA
catagatttcttggcctttatgctgtggtgtgtcgccacggtggagatttgtcaaatacacatcattaggttgcgacaaacggcagaagctggaggaggaagggcctgagtccgagcagaagaacctgcaggacctatcattcannnnnnnnaaagttctcccatcacatcaaccggtggcgcattgccacgaagcaggccaatggggaggacatcgatgtcacacaaccaaatataagaattgttagcaagaaatctatg

SEQ ID NO: 19636 - DNA, 261 bp, synthetic construct
  source 1..261: mol_type = other DNA
catagatttcttggcctttatgctgtggtggttcgccacggtggagatttgtcaaatacacatcattaggttgcgacaaacggcagaagctggaggaggaagggcctgagtccgagcagaagaacctgcaggacctatcattcannnnnnnnaaagttctcccatcacatcaaccggtggcgcattgccacgaagcaggccaatggggaggacatcgatgtcacacaaccaaatataagaattgttagcaagaaatctatg

SEQ ID NO: 19637 - DNA, 261 bp, synthetic construct
  source 1..261: mol_type = other DNA
catagatttcttggcctttatgctgtggtgttccgccacggtggagatttgtcaaatacacatcattaggttgcgacaaacggcagaagctggaggaggaagggcctgagtccgagcagaagaacctgcaggacctatcattcannnnnnnnaaagttctcccatcacatcaaccggtggcgcattgccacgaagcaggccaatggggaggacatcgatgtcacacaaccaaatataagaattgttagcaagaaatctatg

SEQ ID NO: 19638 - DNA, 261 bp, synthetic construct
  source 1..261: mol_type = other DNA
catagatttcttggcctttatgctgtggtgtctcgccacggtggagatttgtcaaatacacatcattaggttgcgacaaacggcagaagctggaggaggaagggcctgagtccgagcagaagaacctgcaggacctatcattcannnnnnnnaaagttctcccatcacatcaaccggtggcgcattgccacgaagcaggccaatggggaggacatcgatgtcacacaaccaaatataagaattgttagcaagaaatctatg

SEQ ID NO: 19639 - DNA, 261 bp, synthetic construct
  source 1..261: mol_type = other DNA
catagatttcttggcctttatgctgtggtgcttcgccacggtggagatttgtcaaatacacatcattaggttgcgacaaacggcagaagctggaggaggaagggcctgagtccgagcagaagaacctgcaggacctatcattcannnnnnnnaaagttctcccatcacatcaaccggtggcgcattgccacgaagcaggccaatggggaggacatcgatgtcacacaaccaaatataagaattgttagcaagaaatctatg

SEQ ID NO: 19640 - DNA, 261 bp, synthetic construct
  source 1..261: mol_type = other DNA
catagatttcttggcctttatgctgtggtgtttcgccacggtggagatttgtcaaatacacatcattaggttgcgacaaacggcagaagctggaggaggaagggcctgagtccgagcagaagaacctgcaggacctatcattcannnnnnnnaaagttctcccatcacatcaaccggtggcgcattgccacgaagcaggccaatggggaggacatcgatgtcacacaaccaaatataagaattgttagcaagaaatctatg

SEQ ID NO: 19641 - DNA, 262 bp, synthetic construct
  source 1..262: mol_type = other DNA
catagatttcttggcctttatgctgtggtgttttcgccacggtggagatttgtcaaatacacatcattaggttgcgacaaacggcagaagctggaggaggaagggcctgagtccgagcagaagaacctgcaggacctatcattcannnnnnnnaaagttctcccatcacatcaaccggtggcgcattgccacgaagcaggccaatggggaggacatcgatgtcacacaaccaaatataagaattgttagcaagaaatctatg

SEQ ID NO: 19642 - DNA, 262 bp, synthetic construct
  source 1..262: mol_type = other DNA
catagatttcttggcctttatgctgtggtgttgccgccacggtggagatttgtcaaatacacatcattaggttgcgacaaacggcagaagctggaggaggaagggcctgagtccgagcagaagaacctgcaggacctatcattcannnnnnnnaaagttctcccatcacatcaaccggtggcgcattgccacgaagcaggccaatggggaggacatcgatgtcacacaaccaaatataagaattgttagcaagaaatctatg

SEQ ID NO: 19643 - DNA, 262 bp, synthetic construct
  source 1..262: mol_type = other DNA
catagatttcttggcctttatgctgtggtgcttgcgccacggtggagatttgtcaaatacacatcattaggttgcgacaaacggcagaagctggaggaggaagggcctgagtccgagcagaagaacctgcaggacctatcattcannnnnnnnaaagttctcccatcacatcaaccggtggcgcattgccacgaagcaggccaatggggaggacatcgatgtcacacaaccaaatataagaattgttagcaagaaatctatg

SEQ ID NO: 19644 - DNA, 253 bp, synthetic construct
  source 1..253: mol_type = other DNA
catagatttcttggcctttattataattgttataggagatttgtcaaatacacatcattaggttgcgacaaacggcagaagctggaggaggaagggcctgagtccgagcagaagaacctgcaggacctatcattcannnnnnnnaaagttctcccatcacatcaaccggtggcgcattgccacgaagcaggccaatggggaggacatcgatgtcacacaaccaaatataagaattgttagcaagaaatctatg

SEQ ID NO: 19645 - DNA, 253 bp, synthetic construct
  source 1..253: mol_type = other DNA
catagatttcttggcctttattgatattgtatcaggagatttgtcaaatacacatcattaggttgcgacaaacggcagaagctggaggaggaagggcctgagtccgagcagaagaacctgcaggacctatcattcannnnnnnnaaagttctcccatcacatcaaccggtggcgcattgccacgaagcaggccaatggggaggacatcgatgtcacacaaccaaatataagaattgttagcaagaaatctatg

SEQ ID NO: 19646 - DNA, 253 bp, synthetic construct
  source 1..253: mol_type = other DNA
catagatttcttggcctttattctacttggtagaggagatttgtcaaatacacatcattaggttgcgacaaacggcagaagctggaggaggaagggcctgagtccgagcagaagaacctgcaggacctatcattcannnnnnnnaaagttctcccatcacatcaaccggtggcgcattgccacgaagcaggccaatggggaggacatcgatgtcacacaaccaaatataagaattgttagcaagaaatctatg

SEQ ID NO: 19647 - DNA, 253 bp, synthetic construct
  source 1..253: mol_type = other DNA
catagatttcttggcctttatgatccttgggatcggagatttgtcaaatacacatcattaggttgcgacaaacggcagaagctggaggaggaagggcctgagtccgagcagaagaacctgcaggacctatcattcannnnnnnnaaagttctcccatcacatcaaccggtggcgcattgccacgaagcaggccaatggggaggacatcgatgtcacacaaccaaatataagaattgttagcaagaaatctatg

SEQ ID NO: 19648 - DNA, 253 bp, synthetic construct
  source 1..253: mol_type = other DNA
catagatttcttggcctttatacgcgttgcgcgtggagatttgtcaaatacacatcattaggttgcgacaaacggcagaagctggaggaggaagggcctgagtccgagcagaagaacctgcaggacctatcattcannnnnnnnaaagttctcccatcacatcaaccggtggcgcattgccacgaagcaggccaatggggaggacatcgatgtcacacaaccaaatataagaattgttagcaagaaatctatg

SEQ ID NO: 19649 - DNA, 253 bp, synthetic construct
  source 1..253: mol_type = other DNA
catagatttcttggcctttatcgcgcttggcgcgggagatttgtcaaatacacatcattaggttgcgacaaacggcagaagctggaggaggaagggcctgagtccgagcagaagaacctgcaggacctatcattcannnnnnnnaaagttctcccatcacatcaaccggtggcgcattgccacgaagcaggccaatggggaggacatcgatgtcacacaaccaaatataagaattgttagcaagaaatctatg

SEQ ID NO: 19650 - DNA, 263 bp, synthetic construct
  source 1..263: mol_type = other DNA
catagatttcttggcctttattattaaatttttgaaatttaataggagatttgtcaaatacacatcattaggttgcgacaaacggcagaagctggaggaggaagggcctgagtccgagcagaagaacctgcaggacctatcattcannnnnnnnaaagttctcccatcacatcaaccggtggcgcattgccacgaagcaggccaatggggaggacatcgatgtcacacaaccaaatataagaattgttagcaagaaatctatg

SEQ ID NO: 19651 - DNA, 263 bp, synthetic construct
  source 1..263: mol_type = other DNA
catagatttcttggcctttattataatacgattgtcgtattataggagatttgtcaaatacacatcattaggttgcgacaaacggcagaagctggaggaggaagggcctgagtccgagcagaagaacctgcaggacctatcattcannnnnnnnaaagttctcccatcacatcaaccggtggcgcattgccacgaagcaggccaatggggaggacatcgatgtcacacaaccaaatataagaattgttagcaagaaatctatg

SEQ ID NO: 19652 - DNA, 263 bp, synthetic construct
  source 1..263: mol_type = other DNA
catagatttcttggcctttatttctgccaatttgattggcagaaggagatttgtcaaatacacatcattaggttgcgacaaacggcagaagctggaggaggaagggcctgagtccgagcagaagaacctgcaggacctatcattcannnnnnnnaaagttctcccatcacatcaaccggtggcgcattgccacgaagcaggccaatggggaggacatcgatgtcacacaaccaaatataagaattgttagcaagaaatctatg

SEQ ID NO: 19653 - DNA, 263 bp, synthetic construct
  source 1..263: mol_type = other DNA
catagatttcttggcctttattctcctcgagttgctcgaggagaggagatttgtcaaatacacatcattaggttgcgacaaacggcagaagctggaggaggaagggcctgagtccgagcagaagaacctgcaggacctatcattcannnnnnnnaaagttctcccatcacatcaaccggtggcgcattgccacgaagcaggccaatggggaggacatcgatgtcacacaaccaaatataagaattgttagcaagaaatctatg

SEQ ID NO: 19654 - DNA, 263 bp, synthetic construct
  source 1..263: mol_type = other DNA
catagatttcttggcctttatccgggttcgcttggcgaacccggggagatttgtcaaatacacatcattaggttgcgacaaacggcagaagctggaggaggaagggcctgagtccgagcagaagaacctgcaggacctatcattcannnnnnnnaaagttctcccatcacatcaaccggtggcgcattgccacgaagcaggccaatggggaggacatcgatgtcacacaaccaaatataagaattgttagcaagaaatctatg

SEQ ID NO: 19655 - DNA, 263 bp, synthetic construct
  source 1..263: mol_type = other DNA
catagatttcttggcctttatggccgggcccttggggcccggccggagatttgtcaaatacacatcattaggttgcgacaaacggcagaagctggaggaggaagggcctgagtccgagcagaagaacctgcaggacctatcattcannnnnnnnaaagttctcccatcacatcaaccggtggcgcattgccacgaagcaggccaatggggaggacatcgatgtcacacaaccaaatataagaattgttagcaagaaatctatg

SEQ ID NO: 19656 - DNA, 273 bp, synthetic construct
  source 1..273: mol_type = other DNA
catagatttcttggcctttataaatttaattataaattgtttataattaaatttggagatttgtcaaatacacatcattaggttgcgacaaacggcagaagctggaggaggaagggcctgagtccgagcagaagaacctgcaggacctatcattcannnnnnnnaaagttctcccatcacatcaaccggtggcgcattgccacgaagcaggccaatggggaggacatcgatgtcacacaaccaaatataagaattgttagcaagaaatctatg

SEQ ID NO: 19657 - DNA, 273 bp, synthetic construct
  source 1..273: mol_type = other DNA
catagatttcttggcctttatatattctattacttgttgcaagtaatagaatatggagatttgtcaaatacacatcattaggttgcgacaaacggcagaagctggaggaggaagggcctgagtccgagcagaagaacctgcaggacctatcattcannnnnnnnaaagttctcccatcacatcaaccggtggcgcattgccacgaagcaggccaatggggaggacatcgatgtcacacaaccaaatataagaattgttagcaagaaatctatg

SEQ ID NO: 19658 - DNA, 273 bp, synthetic construct
  source 1..273: mol_type = other DNA
catagatttcttggcctttatgcgtatagtaatctgttgcagattactatacgcggagatttgtcaaatacacatcattaggttgcgacaaacggcagaagctggaggaggaagggcctgagtccgagcagaagaacctgcaggacctatcattcannnnnnnnaaagttctcccatcacatcaaccggtggcgcattgccacgaagcaggccaatggggaggacatcgatgtcacacaaccaaatataagaattgttagcaagaaatctatg

SEQ ID NO: 19659 - DNA, 273 bp, synthetic construct
  source 1..273: mol_type = other DNA
catagatttcttggcctttataacgcgaaacgctggttgccagcgtttcgcgttggagatttgtcaaatacacatcattaggttgcgacaaacggcagaagctggaggaggaagggcctgagtccgagcagaagaacctgcaggacctatcattcannnnnnnnaaagttctcccatcacatcaaccggtggcgcattgccacgaagcaggccaatggggaggacatcgatgtcacacaaccaaatataagaattgttagcaagaaatctatg

SEQ ID NO: 19660 - DNA, 273 bp, synthetic construct
  source 1..273: mol_type = other DNA
catagatttcttggcctttatgaggcgggtgccgcattgtgcggcacccgcctcggagatttgtcaaatacacatcattaggttgcgacaaacggcagaagctggaggaggaagggcctgagtccgagcagaagaacctgcaggacctatcattcannnnnnnnaaagttctcccatcacatcaaccggtggcgcattgccacgaagcaggccaatggggaggacatcgatgtcacacaaccaaatataagaattgttagcaagaaatctatg

SEQ ID NO: 19661 - DNA, 273 bp, synthetic construct
  source 1..273: mol_type = other DNA
catagatttcttggcctttatgcggccgcgggcgggttgcccgcccgcggccgcggagatttgtcaaatacacatcattaggttgcgacaaacggcagaagctggaggaggaagggcctgagtccgagcagaagaacctgcaggacctatcattcannnnnnnnaaagttctcccatcacatcaaccggtggcgcattgccacgaagcaggccaatggggaggacatcgatgtcacacaaccaaatataagaattgttagcaagaaatctatg

SEQ ID NO: 19662 - DNA, 283 bp, synthetic construct
  source 1..283: mol_type = other DNA
catagatttcttggcctttataatattatattaaatattatttgataatatttaatataatattggagatttgtcaaatacacatcattaggttgcgacaaacggcagaagctggaggaggaagggcctgagtccgagcagaagaacctgcaggacctatcattcannnnnnnnaaagttctcccatcacatcaaccggtggcgcattgccacgaagcaggccaatggggaggacatcgatgtcacacaaccaaatataagaattgttagcaagaaatctatg

SEQ ID NO: 19663 - DNA, 283 bp, synthetic construct
  source 1..283: mol_type = other DNA
catagatttcttggcctttatgaacaaactaaatataaatcttggatttatatttagtttgttcggagatttgtcaaatacacatcattaggttgcgacaaacggcagaagctggaggaggaagggcctgagtccgagcagaagaacctgcaggacctatcattcannnnnnnnaaagttctcccatcacatcaaccggtggcgcattgccacgaagcaggccaatggggaggacatcgatgtcacacaaccaaatataagaattgttagcaagaaatctatg

SEQ ID NO: 19664 - DNA, 283 bp, synthetic construct
  source 1..283: mol_type = other DNA
catagatttcttggcctttatcgatttctaagacttcggtattgtaccgaagtcttagaaatcgggagatttgtcaaatacacatcattaggttgcgacaaacggcagaagctggaggaggaagggcctgagtccgagcagaagaacctgcaggacctatcattcannnnnnnnaaagttctcccatcacatcaaccggtggcgcattgccacgaagcaggccaatggggaggacatcgatgtcacacaaccaaatataagaattgttagcaagaaatctatg

SEQ ID NO: 19665 - DNA, 283 bp, synthetic construct
  source 1..283: mol_type = other DNA
catagatttcttggcctttatgtcagggaactccaggaggattgtcctcctggagttccctgacggagatttgtcaaatacacatcattaggttgcgacaaacggcagaagctggaggaggaagggcctgagtccgagcagaagaacctgcaggacctatcattcannnnnnnnaaagttctcccatcacatcaaccggtggcgcattgccacgaagcaggccaatggggaggacatcgatgtcacacaaccaaatataagaattgttagcaagaaatctatg

SEQ ID NO: 19666 - DNA, 283 bp, synthetic construct
  source 1..283: mol_type = other DNA
catagatttcttggcctttatcgtgggccgcgcttgagccgttgcggctcaagcgcggcccacgggagatttgtcaaatacacatcattaggttgcgacaaacggcagaagctggaggaggaagggcctgagtccgagcagaagaacctgcaggacctatcattcannnnnnnnaaagttctcccatcacatcaaccggtggcgcattgccacgaagcaggccaatggggaggacatcgatgtcacacaaccaaatataagaattgttagcaagaaatctatg

SEQ ID NO: 19667 - DNA, 283 bp, synthetic construct
  source 1..283: mol_type = other DNA
catagatttcttggcctttatcggccgccggcgccggcgcgttgcgcgccggcgccggcggccgggagatttgtcaaatacacatcattaggttgcgacaaacggcagaagctggaggaggaagggcctgagtccgagcagaagaacctgcaggacctatcattcannnnnnnnaaagttctcccatcacatcaaccggtggcgcattgccacgaagcaggccaatggggaggacatcgatgtcacacaaccaaatataagaattgttagcaagaaatctatg

SEQ ID NO: 19668 - DNA, 293 bp, synthetic construct
  source 1..293: mol_type = other DNA
catagatttcttggcctttatattaatatataaatttaattatatattgtatataattaaatttatatattaatggagatttgtcaaatacacatcattaggttgcgacaaacggcagaagctggaggaggaagggcctgagtccgagcagaagaacctgcaggacctatcattcannnnnnnnaaagttctcccatcacatcaaccggtggcgcattgccacgaagcaggccaatggggaggacatcgatgtcacacaaccaaatataagaattgttagcaagaaatctatg

SEQ ID NO: 19669 - DNA, 293 bp, synthetic construct
  source 1..293: mol_type = other DNA
catagatttcttggcctttatgttatactaataagaattatctgaattgttcagataattcttattagtataacggagatttgtcaaatacacatcattaggttgcgacaaacggcagaagctggaggaggaagggcctgagtccgagcagaagaacctgcaggacctatcattcannnnnnnnaaagttctcccatcacatcaaccggtggcgcattgccacgaagcaggccaatggggaggacatcgatgtcacacaaccaaatataagaattgttagcaagaaatctatg

SEQ ID NO: 19670 - DNA, 293 bp, synthetic construct
  source 1..293: mol_type = other DNA
catagatttcttggcctttatttaagatagaggcacttctagtgagttgctcactagaagtgcctctatcttaaggagatttgtcaaatacacatcattaggttgcgacaaacggcagaagctggaggaggaagggcctgagtccgagcagaagaacctgcaggacctatcattcannnnnnnnaaagttctcccatcacatcaaccggtggcgcattgccacgaagcaggccaatggggaggacatcgatgtcacacaaccaaatataagaattgttagcaagaaatctatg

SEQ ID NO: 19671 - DNA, 293 bp, synthetic construct
  source 1..293: mol_type = other DNA
catagatttcttggcctttatcaggcagcacgcacacagccgaaatttgatttcggctgtgtgcgtgctgcctgggagatttgtcaaatacacatcattaggttgcgacaaacggcagaagctggaggaggaagggcctgagtccgagcagaagaacctgcaggacctatcattcannnnnnnnaaagttctcccatcacatcaaccggtggcgcattgccacgaagcaggccaatggggaggacatcgatgtcacacaaccaaatataagaattgttagcaagaaatctatg

SEQ ID NO: 19672 - DNA, 293 bp, synthetic construct
  source 1..293: mol_type = other DNA
catagatttcttggcctttatcaccactggcgccgccagcaggcggttgccgcctgctggcggcgccagtggtgggagatttgtcaaatacacatcattaggttgcgacaaacggcagaagctggaggaggaagggcctgagtccgagcagaagaacctgcaggacctatcattcannnnnnnnaaagttctcccatcacatcaaccggtggcgcattgccacgaagcaggccaatggggaggacatcgatgtcacacaaccaaatataagaattgttagcaagaaatctatg

SEQ ID NO: 19673 - DNA, 293 bp, synthetic construct
  source 1..293: mol_type = other DNA
catagatttcttggcctttatcgcggccgcgccgggcgcgcgcccgttgcgggcgcgcgcccggcgcggccgcgggagatttgtcaaatacacatcattaggttgcgacaaacggcagaagctggaggaggaagggcctgagtccgagcagaagaacctgcaggacctatcattcannnnnnnnaaagttctcccatcacatcaaccggtggcgcattgccacgaagcaggccaatggggaggacatcgatgtcacacaaccaaatataagaattgttagcaagaaatctatg

SEQ ID NO: 19674 - DNA, 303 bp, synthetic construct
  source 1..303: mol_type = other DNA
catagatttcttggcctttataataattattatataataatatattaataattgttattaatatattattatataataattattggagatttgtcaaatacacatcattaggttgcgacaaacggcagaagctggaggaggaagggcctgagtccgagcagaagaacctgcaggacctatcattcannnnnnnnaaagttctcccatcacatcaaccggtggcgcattgccacgaagcaggccaatggggaggacatcgatgtcacacaaccaaatataagaattgttagcaagaaatctatg

SEQ ID NO: 19675 - DNA, 303 bp, synthetic construct
  source 1..303: mol_type = other DNA
catagatttcttggcctttataataatataatcccttagtctattagtttattgtaaactaatagactaagggattatattattggagatttgtcaaatacacatcattaggttgcgacaaacggcagaagctggaggaggaagggcctgagtccgagcagaagaacctgcaggacctatcattcannnnnnnnaaagttctcccatcacatcaaccggtggcgcattgccacgaagcaggccaatggggaggacatcgatgtcacacaaccaaatataagaattgttagcaagaaatctatg

SEQ ID NO: 19676 - DNA, 303 bp, synthetic construct
  source 1..303: mol_type = other DNA
catagatttcttggcctttattaatttacaggacagggactttactcgatcttggatcgagtaaagtccctgtcctgtaaattaggagatttgtcaaatacacatcattaggttgcgacaaacggcagaagctggaggaggaagggcctgagtccgagcagaagaacctgcaggacctatcattcannnnnnnnaaagttctcccatcacatcaaccggtggcgcattgccacgaagcaggccaatggggaggacatcgatgtcacacaaccaaatataagaattgttagcaagaaatctatg

SEQ ID NO: 19677 - DNA, 303 bp, synthetic construct
  source 1..303: mol_type = other DNA
catagatttcttggcctttattatctggcaacggccagagagagcgcctgattgtcaggcgctctctctggccgttgccagataggagatttgtcaaatacacatcattaggttgcgacaaacggcagaagctggaggaggaagggcctgagtccgagcagaagaacctgcaggacctatcattcannnnnnnnaaagttctcccatcacatcaaccggtggcgcattgccacgaagcaggccaatggggaggacatcgatgtcacacaaccaaatataagaattgttagcaagaaatctatg

SEQ ID NO: 19678 - DNA, 303 bp, synthetic construct
  source 1..303: mol_type = other DNA
catagatttcttggcctttatgccgtcccgcgcggcctgcccaaacgccctttgagggcgtttgggcaggccgcgcgggacggcggagatttgtcaaatacacatcattaggttgcgacaaacggcagaagctggaggaggaagggcctgagtccgagcagaagaacctgcaggacctatcattcannnnnnnnaaagttctcccatcacatcaaccggtggcgcattgccacgaagcaggccaatggggaggacatcgatgtcacacaaccaaatataagaattgttagcaagaaatctatg

SEQ ID NO: 19679 - DNA, 303 bp, synthetic construct
  source 1..303: mol_type = other DNA
catagatttcttggcctttatcgccgccggccgggcgcgggcgccggcggcttggccgccggcgcccgcgcccggccggcggcgggagatttgtcaaatacacatcattaggttgcgacaaacggcagaagctggaggaggaagggcctgagtccgagcagaagaacctgcaggacctatcattcannnnnnnnaaagttctcccatcacatcaaccggtggcgcattgccacgaagcaggccaatggggaggacatcgatgtcacacaaccaaatataagaattgttagcaagaaatctatg

SEQ ID NO: 19680 - DNA, 313 bp, synthetic construct
  source 1..313: mol_type = other DNA
catagatttcttggcctttataatatatataaatattaataataatattaataaatttgatttattaatattattattaatatttatatatattggagatttgtcaaatacacatcattaggttgcgacaaacggcagaagctggaggaggaagggcctgagtccgagcagaagaacctgcaggacctatcattcannnnnnnnaaagttctcccatcacatcaaccggtggcgcattgccacgaagcaggccaatggggaggacatcgatgtcacacaaccaaatataagaattgttagcaagaaatctatg

SEQ ID NO: 19681 - DNA, 313 bp, synthetic construct
  source 1..313: mol_type = other DNA
catagatttcttggcctttatttaatatctaacaattattgaagttgctttatttcttggaaataaagcaacttcaataattgttagatattaaggagatttgtcaaatacacatcattaggttgcgacaaacggcagaagctggaggaggaagggcctgagtccgagcagaagaacctgcaggacctatcattcannnnnnnnaaagttctcccatcacatcaaccggtggcgcattgccacgaagcaggccaatggggaggacatcgatgtcacacaaccaaatataagaattgttagcaagaaatctatg

SEQ ID NO: 19682 - DNA, 313 bp, synthetic construct
  source 1..313: mol_type = other DNA
catagatttcttggcctttatcagttatagcgcgaactagtttgacctgatttgtattgtacaaatcaggtcaaactagttcgcgctataactgggagatttgtcaaatacacatcattaggttgcgacaaacggcagaagctggaggaggaagggcctgagtccgagcagaagaacctgcaggacctatcattcannnnnnnnaaagttctcccatcacatcaaccggtggcgcattgccacgaagcaggccaatggggaggacatcgatgtcacacaaccaaatataagaattgttagcaagaaatctatg

SEQ ID NO: 19683 - DNA, 313 bp, synthetic construct
  source 1..313: mol_type = other DNA
catagatttcttggcctttatatagactggccgcccgtaggaacttgaggacgcacttggtgcgtcctcaagttcctacgggcggccagtctatggagatttgtcaaatacacatcattaggttgcgacaaacggcagaagctggaggaggaagggcctgagtccgagcagaagaacctgcaggacctatcattcannnnnnnnaaagttctcccatcacatcaaccggtggcgcattgccacgaagcaggccaatggggaggacatcgatgtcacacaaccaaatataagaattgttagcaagaaatctatg

SEQ ID NO: 19684 - DNA, 313 bp, synthetic construct
  source 1..313: mol_type = other DNA
catagatttcttggcctttatgcgagcgcgaggacgccacgagcacgcgccctgccttgggcagggcgcgtgctcgtggcgtcctcgcgctcgcggagatttgtcaaatacacatcattaggttgcgacaaacggcagaagctggaggaggaagggcctgagtccgagcagaagaacctgcaggacctatcattcannnnnnnnaaagttctcccatcacatcaaccggtggcgcattgccacgaagcaggccaatggggaggacatcgatgtcacacaaccaaatataagaattgttagcaagaaatctatg

SEQ ID NO: 19685 - DNA, 313 bp, synthetic construct
  source 1..313: mol_type = other DNA
catagatttcttggcctttatcggccggcgcccgggccgggcgggcccgcgggcggttgccgcccgcgggcccgcccggcccgggcgccggccgggagatttgtcaaatacacatcattaggttgcgacaaacggcagaagctggaggaggaagggcctgagtccgagcagaagaacctgcaggacctatcattcannnnnnnnaaagttctcccatcacatcaaccggtggcgcattgccacgaagcaggccaatggggaggacatcgatgtcacacaaccaaatataagaattgttagcaagaaatctatg

SEQ ID NO: 19686 - DNA, 257 bp, synthetic construct
  source 1..257: mol_type = other DNA
catagatttcttggcatgctgtggtgttgcgccacggtggagatttgtcaaatacacatcattaggttgcgacaaacggcagaagctggaggaggaagggcctgagtccgagcagaagaacctgcaggacctatcattcannnnnnnnaaagttctcccatcacatcaaccggtggcgcattgccacgaagcaggccaatggggaggacatcgatgtcacacaaccaaatataagaattgttagcaagaaatctatg

SEQ ID NO: 19687 - DNA, 256 bp, synthetic construct
  source 1..256: mol_type = other DNA
catagatttcttggcctttatgctgtggtgttgcgccacggtggtgtcaaatacacatcattaggttgcgacaaacggcagaagctggaggaggaagggcctgagtccgagcagaagaacctgcaggacctatcattcannnnnnnnaaagttctcccatcacatcaaccggtggcgcattgccacgaagcaggccaatggggaggacatcgatgtcacacaaccaaatataagaattgttagcaagaaatctatg

SEQ ID NO: 19688 - DNA, 256 bp, synthetic construct
  source 1..256: mol_type = other DNA
catagatttcttggcctttatgctgtggtgttgcgccacggtggagatttgtcaaatacactaggttgcgacaaacggcagaagctggaggaggaagggcctgagtccgagcagaagaacctgcaggacctatcattcannnnnnnnaaagttctcccatcacatcaaccggtggcgcattgccacgaagcaggccaatggggaggacatcgatgtcacacaaccaaatataagaattgttagcaagaaatctatg

SEQ ID NO: 19689 - DNA, 251 bp, synthetic construct
  source 1..251: mol_type = other DNA
catagatttcttggcctttatgctgtggtgttgcgccacggtggaatacacatcattaggttgcgacaaacggcagaagctggaggaggaagggcctgagtccgagcagaagaacctgcaggacctatcattcannnnnnnnaaagttctcccatcacatcaaccggtggcgcattgccacgaagcaggccaatggggaggacatcgatgtcacacaaccaaatataagaattgttagcaagaaatctatg

SEQ ID NO: 19690 - DNA, 251 bp, synthetic construct
  source 1..251: mol_type = other DNA
catagatttcttggcctttatgctgtggtgttgcgccacggtggagatttgtcaaataggttgcgacaaacggcagaagctggaggaggaagggcctgagtccgagcagaagaacctgcaggacctatcattcannnnnnnnaaagttctcccatcacatcaaccggtggcgcattgccacgaagcaggccaatggggaggacatcgatgtcacacaaccaaatataagaattgttagcaagaaatctatg

SEQ ID NO: 19691 - DNA, 245 bp, synthetic construct
  source 1..245: mol_type = other DNA
catagatttcttggcctttatgctgtggtgttgcgccacggtggcatcattaggttgcgacaaacggcagaagctggaggaggaagggcctgagtccgagcagaagaacctgcaggacctatcattcannnnnnnnaaagttctcccatcacatcaaccggtggcgcattgccacgaagcaggccaatggggaggacatcgatgtcacacaaccaaatataagaattgttagcaagaaatctatg

SEQ ID NO: 19692 - DNA, 245 bp, synthetic construct
  source 1..245: mol_type = other DNA
catagatttcttggcctttatgctgtggtgttgcgccacggtggagattttaggttgcgacaaacggcagaagctggaggaggaagggcctgagtccgagcagaagaacctgcaggacctatcattcannnnnnnnaaagttctcccatcacatcaaccggtggcgcattgccacgaagcaggccaatggggaggacatcgatgtcacacaaccaaatataagaattgttagcaagaaatctatg

SEQ ID NO: 19693 - DNA, 239 bp, synthetic construct
  source 1..239: mol_type = other DNA
catagatttcttggcctttatgctgtggtgttgcgccacggtggtaggttgcgacaaacggcagaagctggaggaggaagggcctgagtccgagcagaagaacctgcaggacctatcattcannnnnnnnaaagttctcccatcacatcaaccggtggcgcattgccacgaagcaggccaatggggaggacatcgatgtcacacaaccaaatataagaattgttagcaagaaatctatg

SEQ ID NO: 19694 - DNA, 256 bp, synthetic construct
  source 1..256: mol_type = other DNA
catagatttcttggcctttatgctgtggtgttgcgccacggtggagatttgtcaaatacacatcattaggttgcgacaaacggcagaagctggaggaggaagggcctgagtccgagcagaagaacctgcaggacctatcattcannnnnnnnaaagttctcccatcacatcaaccggtggcgcattgccacgaagcaggccaatggggaggacatcgatgtcacacaaccaaagaattgttagcaagaaatctatg

SEQ ID NO: 19695 - DNA, 256 bp, synthetic construct
  source 1..256: mol_type = other DNA
catagatttcttggcctttatgctgtggtgttgcgccacggtggagatttgtcaaatacacatcattaggttgcgacaaacggcagaagctggaggaggaagggcctgagtccgagcagaagaacctgcaggacctatcattcannnnnnnnaaagttctcccatcacatcaaccggtggcgcattgccacgaagcaggccaatggggaggacatcgatgtcacacaaccaaatataagaaagcaagaaatctatg

SEQ ID NO: 19696 - DNA, 251 bp, synthetic construct
  source 1..251: mol_type = other DNA
catagatttcttggcctttatgctgtggtgttgcgccacggtggagatttgtcaaatacacatcattaggttgcgacaaacggcagaagctggaggaggaagggcctgagtccgagcagaagaacctgcaggacctatcattcannnnnnnnaaagttctcccatcacatcaaccggtggcgcattgccacgaagcaggccaatggggaggacatcgatgtcacacaaccaatgttagcaagaaatctatg

SEQ ID NO: 19697 - DNA, 251 bp, synthetic construct
  source 1..251: mol_type = other DNA
catagatttcttggcctttatgctgtggtgttgcgccacggtggagatttgtcaaatacacatcattaggttgcgacaaacggcagaagctggaggaggaagggcctgagtccgagcagaagaacctgcaggacctatcattcannnnnnnnaaagttctcccatcacatcaaccggtggcgcattgccacgaagcaggccaatggggaggacatcgatgtcacacaaccaaatatagcaagaaatctatg

SEQ ID NO: 19698 - DNA, 247 bp, synthetic construct
  source 1..247: mol_type = other DNA
catagatttcttggcctttatgctgtggtgttgcgccacggtggagatttgtcaaatacacatcattaggttgcgacaaacggcagaagctggaggaggaagggcctgagtccgagcagaagaacctgcaggacctatcattcannnnnnnnaaagttctcccatcacatcaaccggtggcgcattgccacgaagcaggccaatggggaggacatcgatgtcacacaaccaaagcaagaaatctatg

SEQ ID NO: 19699 - DNA, 261 bp, synthetic construct
  source 1..261: mol_type = other DNA
catagatttcttggcctttatgctgtggtgttgcgccacggtggagatttgtcaaatacacataattaggttgcgacaaacggcagaagctggaggaggaagggcctgagtccgagcagaagaacctgcaggacctatcattcannnnnnnnaaagttctcccatcacatcaaccggtggcgcattgccacgaagcaggccaatggggaggacatcgatgtcacacaaccaaatataagaattgttagcaagaaatctatg

SEQ ID NO: 19700 - DNA, 261 bp, synthetic construct
  source 1..261: mol_type = other DNA
catagatttcttggcctttatgctgtggtgttgcgccacggtggagatttgtcaaatacacattattaggttgcgacaaacggcagaagctggaggaggaagggcctgagtccgagcagaagaacctgcaggacctatcattcannnnnnnnaaagttctcccatcacatcaaccggtggcgcattgccacgaagcaggccaatggggaggacatcgatgtcacacaaccaaatataagaattgttagcaagaaatctatg

SEQ ID NO: 19701 - DNA, 261 bp, synthetic construct
  source 1..261: mol_type = other DNA
catagatttcttggcctttatgctgtggtgttgcgccacggtggagatttgtcaaatacaaatcattaggttgcgacaaacggcagaagctggaggaggaagggcctgagtccgagcagaagaacctgcaggacctatcattcannnnnnnnaaagttctcccatcacatcaaccggtggcgcattgccacgaagcaggccaatggggaggacatcgatgtcacacaaccaaatataagaattgttagcaagaaatctatg

SEQ ID NO: 19702 - DNA, 261 bp, synthetic construct
  source 1..261: mol_type = other DNA
catagatttcttggcctttatgctgtggtgttgcgccacggtggagatttgtcaaatacatatcattaggttgcgacaaacggcagaagctggaggaggaagggcctgagtccgagcagaagaacctgcaggacctatcattcannnnnnnnaaagttctcccatcacatcaaccggtggcgcattgccacgaagcaggccaatggggaggacatcgatgtcacacaaccaaatataagaattgttagcaagaaatctatg

SEQ ID NO: 19703 - DNA, 261 bp, synthetic construct
  source 1..261: mol_type = other DNA
catagatttcttggcctttatgctgtggtgttgcgccacggtggagatttgtcaaatacaaataattaggttgcgacaaacggcagaagctggaggaggaagggcctgagtccgagcagaagaacctgcaggacctatcattcannnnnnnnaaagttctcccatcacatcaaccggtggcgcattgccacgaagcaggccaatggggaggacatcgatgtcacacaaccaaatataagaattgttagcaagaaatctatg

SEQ ID NO: 19704 - DNA, 261 bp, synthetic construct
  source 1..261: mol_type = other DNA
catagatttcttggcctttatgctgtggtgttgcgccacggtggagatttgtcaaatacaaattattaggttgcgacaaacggcagaagctggaggaggaagggcctgagtccgagcagaagaacctgcaggacctatcattcannnnnnnnaaagttctcccatcacatcaaccggtggcgcattgccacgaagcaggccaatggggaggacatcgatgtcacacaaccaaatataagaattgttagcaagaaatctatg

SEQ ID NO: 19705 - DNA, 261 bp, synthetic construct
  source 1..261: mol_type = other DNA
catagatttcttggcctttatgctgtggtgttgcgccacggtggagatttgtcaaatacatataattaggttgcgacaaacggcagaagctggaggaggaagggcctgagtccgagcagaagaacctgcaggacctatcattcannnnnnnnaaagttctcccatcacatcaaccggtggcgcattgccacgaagcaggccaatggggaggacatcgatgtcacacaaccaaatataagaattgttagcaagaaatctatg

SEQ ID NO: 19706 - DNA, 261 bp, synthetic construct
  source 1..261: mol_type = other DNA
catagatttcttggcctttatgctgtggtgttgcgccacggtggagatttgtcaaatacatattattaggttgcgacaaacggcagaagctggaggaggaagggcctgagtccgagcagaagaacctgcaggacctatcattcannnnnnnnaaagttctcccatcacatcaaccggtggcgcattgccacgaagcaggccaatggggaggacatcgatgtcacacaaccaaatataagaattgttagcaagaaatctatg

SEQ ID NO: 19707 - DNA, 261 bp, synthetic construct
  source 1..261: mol_type = other DNA
catagatttcttggcctttatgctgtggtgttgcgccacggtggagatttgtcaaataaacatcattaggttgcgacaaacggcagaagctggaggaggaagggcctgagtccgagcagaagaacctgcaggacctatcattcannnnnnnnaaagttctcccatcacatcaaccggtggcgcattgccacgaagcaggccaatggggaggacatcgatgtcacacaaccaaatataagaattgttagcaagaaatctatg

SEQ ID NO: 19708 - DNA, 261 bp, synthetic construct
  source 1..261: mol_type = other DNA
catagatttcttggcctttatgctgtggtgttgcgccacggtggagatttgtcaaatatacatcattaggttgcgacaaacggcagaagctggaggaggaagggcctgagtccgagcagaagaacctgcaggacctatcattcannnnnnnnaaagttctcccatcacatcaaccggtggcgcattgccacgaagcaggccaatggggaggacatcgatgtcacacaaccaaatataagaattgttagcaagaaatctatg

SEQ ID NO: 19709 - DNA, 261 bp, synthetic construct
  source 1..261: mol_type = other DNA
catagatttcttggcctttatgctgtggtgttgcgccacggtggagatttgtcaaataaaaatcattaggttgcgacaaacggcagaagctggaggaggaagggcctgagtccgagcagaagaacctgcaggacctatcattcannnnnnnnaaagttctcccatcacatcaaccggtggcgcattgccacgaagcaggccaatggggaggacatcgatgtcacacaaccaaatataagaattgttagcaagaaatctatg

SEQ ID NO: 19710 - DNA, 261 bp, synthetic construct
  source 1..261: mol_type = other DNA
catagatttcttggcctttatgctgtggtgttgcgccacggtggagatttgtcaaataaatatcattaggttgcgacaaacggcagaagctggaggaggaagggcctgagtccgagcagaagaacctgcaggacctatcattcannnnnnnnaaagttctcccatcacatcaaccggtggcgcattgccacgaagcaggccaatggggaggacatcgatgtcacacaaccaaatataagaattgttagcaagaaatctatg

SEQ ID NO: 19711 - DNA, 261 bp, synthetic construct
  source 1..261: mol_type = other DNA
catagatttcttggcctttatgctgtggtgttgcgccacggtggagatttgtcaaatataaatcattaggttgcgacaaacggcagaagctggaggaggaagggcctgagtccgagcagaagaacctgcaggacctatcattcannnnnnnnaaagttctcccatcacatcaaccggtggcgcattgccacgaagcaggccaatggggaggacatcgatgtcacacaaccaaatataagaattgttagcaagaaatctatg

SEQ ID NO: 19712 - DNA, 261 bp, synthetic construct
  source 1..261: mol_type = other DNA
catagatttcttggcctttatgctgtggtgttgcgccacggtggagatttgtcaaatatatatcattaggttgcgacaaacggcagaagctggaggaggaagggcctgagtccgagcagaagaacctgcaggacctatcattcannnnnnnnaaagttctcccatcacatcaaccggtggcgcattgccacgaagcaggccaatggggaggacatcgatgtcacacaaccaaatataagaattgttagcaagaaatctatg

SEQ ID NO: 19713 - DNA, 261 bp, synthetic construct
  source 1..261: mol_type = other DNA
catagatttcttggcctttatgctgtggtgttgcgccacggtggagatttgtaaaatacacatcattaggttgcgacaaacggcagaagctggaggaggaagggcctgagtccgagcagaagaacctgcaggacctatcattcannnnnnnnaaagttctcccatcacatcaaccggtggcgcattgccacgaagcaggccaatggggaggacatcgatgtcacacaaccaaatataagaattgttagcaagaaatctatg

SEQ ID NO: 19714 - DNA, 261 bp, synthetic construct
  source 1..261: mol_type = other DNA
catagatttcttggcctttatgctgtggtgttgcgccacggtggagatttgttaaatacacatcattaggttgcgacaaacggcagaagctggaggaggaagggcctgagtccgagcagaagaacctgcaggacctatcattcannnnnnnnaaagttctcccatcacatcaaccggtggcgcattgccacgaagcaggccaatggggaggacatcgatgtcacacaaccaaatataagaattgttagcaagaaatctatg

SEQ ID NO: 19715 - DNA, 261 bp, synthetic construct
  source 1..261: mol_type = other DNA
catagatttcttggcctttatgctgtggtgttgcgccacggtggagatttgtaaaataaacatcattaggttgcgacaaacggcagaagctggaggaggaagggcctgagtccgagcagaagaacctgcaggacctatcattcannnnnnnnaaagttctcccatcacatcaaccggtggcgcattgccacgaagcaggccaatggggaggacatcgatgtcacacaaccaaatataagaattgttagcaagaaatctatg

SEQ ID NO: 19716 - DNA, 261 bp, synthetic construct
  source 1..261: mol_type = other DNA
catagatttcttggcctttatgctgtggtgttgcgccacggtggagatttgtaaaatatacatcattaggttgcgacaaacggcagaagctggaggaggaagggcctgagtccgagcagaagaacctgcaggacctatcattcannnnnnnnaaagttctcccatcacatcaaccggtggcgcattgccacgaagcaggccaatggggaggacatcgatgtcacacaaccaaatataagaattgttagcaagaaatctatg

SEQ ID NO: 19717 - DNA, 261 bp, synthetic construct
  source 1..261: mol_type = other DNA
catagatttcttggcctttatgctgtggtgttgcgccacggtggagatttgttaaataaacatcattaggttgcgacaaacggcagaagctggaggaggaagggcctgagtccgagcagaagaacctgcaggacctatcattcannnnnnnnaaagttctcccatcacatcaaccggtggcgcattgccacgaagcaggccaatggggaggacatcgatgtcacacaaccaaatataagaattgttagcaagaaatctatg

SEQ ID NO: 19718 - DNA, 261 bp, synthetic construct
  source 1..261: mol_type = other DNA
catagatttcttggcctttatgctgtggtgttgcgccacggtggagatttgttaaatatacatcattaggttgcgacaaacggcagaagctggaggaggaagggcctgagtccgagcagaagaacctgcaggacctatcattcannnnnnnnaaagttctcccatcacatcaaccggtggcgcattgccacgaagcaggccaatggggaggacatcgatgtcacacaaccaaatataagaattgttagcaagaaatctatg

SEQ ID NO: 19719 - DNA, 261 bp, synthetic construct
  source 1..261: mol_type = other DNA
catagatttcttggcctttatgctgtggtgttgcgccacggtggagatttatcaaatacacatcattaggttgcgacaaacggcagaagctggaggaggaagggcctgagtccgagcagaagaacctgcaggacctatcattcannnnnnnnaaagttctcccatcacatcaaccggtggcgcattgccacgaagcaggccaatggggaggacatcgatgtcacacaaccaaatataagaattgttagcaagaaatctatg

SEQ ID NO: 19720 - DNA, 261 bp, synthetic construct
  source 1..261: mol_type = other DNA
catagatttcttggcctttatgctgtggtgttgcgccacggtggagatttttcaaatacacatcattaggttgcgacaaacggcagaagctggaggaggaagggcctgagtccgagcagaagaacctgcaggacctatcattcannnnnnnnaaagttctcccatcacatcaaccggtggcgcattgccacgaagcaggccaatggggaggacatcgatgtcacacaaccaaatataagaattgttagcaagaaatctatg

SEQ ID NO: 19721 - DNA, 261 bp, synthetic construct
  source 1..261: mol_type = other DNA
catagatttcttggcctttatgctgtggtgttgcgccacggtggagatttataaaatacacatcattaggttgcgacaaacggcagaagctggaggaggaagggcctgagtccgagcagaagaacctgcaggacctatcattcannnnnnnnaaagttctcccatcacatcaaccggtggcgcattgccacgaagcaggccaatggggaggacatcgatgtcacacaaccaaatataagaattgttagcaagaaatctatg

SEQ ID NO: 19722 - DNA, 261 bp, synthetic construct
  source 1..261: mol_type = other DNA
catagatttcttggcctttatgctgtggtgttgcgccacggtggagatttattaaatacacatcattaggttgcgacaaacggcagaagctggaggaggaagggcctgagtccgagcagaagaacctgcaggacctatcattcannnnnnnnaaagttctcccatcacatcaaccggtggcgcattgccacgaagcaggccaatggggaggacatcgatgtcacacaaccaaatataagaattgttagcaagaaatctatg

SEQ ID NO: 19723 - DNA, 261 bp, synthetic construct
  source 1..261: mol_type = other DNA
catagatttcttggcctttatgctgtggtgttgcgccacggtggagatttttaaaatacacatcattaggttgcgacaaacggcagaagctggaggaggaagggcctgagtccgagcagaagaacctgcaggacctatcattcannnnnnnnaaagttctcccatcacatcaaccggtggcgcattgccacgaagcaggccaatggggaggacatcgatgtcacacaaccaaatataagaattgttagcaagaaatctatg

SEQ ID NO: 19724 - DNA, 261 bp, synthetic construct
  source 1..261: mol_type = other DNA
catagatttcttggcctttatgctgtggtgttgcgccacggtggagattttttaaatacacatcattaggttgcgacaaacggcagaagctggaggaggaagggcctgagtccgagcagaagaacctgcaggacctatcattcannnnnnnnaaagttctcccatcacatcaaccggtggcgcattgccacgaagcaggccaatggggaggacatcgatgtcacacaaccaaatataagaattgttagcaagaaatctatg

SEQ ID NO: 19725 - DNA, 261 bp, synthetic construct
  source 1..261: mol_type = other DNA
catagatttcttggcctttatgctgtggtgttgcgccacggtggagatttgtcaaatacacatccttaggttgcgacaaacggcagaagctggaggaggaagggcctgagtccgagcagaagaacctgcaggacctatcattcannnnnnnnaaagttctcccatcacatcaaccggtggcgcattgccacgaagcaggccaatggggaggacatcgatgtcacacaaccaaatataagaattgttagcaagaaatctatg

SEQ ID NO: 19726 - DNA, 261 bp, synthetic construct
  source 1..261: mol_type = other DNA
catagatttcttggcctttatgctgtggtgttgcgccacggtggagatttgtcaaatacacatcgttaggttgcgacaaacggcagaagctggaggaggaagggcctgagtccgagcagaagaacctgcaggacctatcattcannnnnnnnaaagttctcccatcacatcaaccggtggcgcattgccacgaagcaggccaatggggaggacatcgatgtcacacaaccaaatataagaattgttagcaagaaatctatg

SEQ ID NO: 19727 - DNA, 261 bp, synthetic construct
  source 1..261: mol_type = other DNA
catagatttcttggcctttatgctgtggtgttgcgccacggtggaggtttgtcaaatacacaccattaggttgcgacaaacggcagaagctggaggaggaagggcctgagtccgagcagaagaacctgcaggacctatcattcannnnnnnnaaagttctcccatcacatcaaccggtggcgcattgccacgaagcaggccaatggggaggacatcgatgtcacacaaccaaatataagaattgttagcaagaaatctatg

SEQ ID NO: 19728 - DNA, 261 bp, synthetic construct
  source 1..261: mol_type = other DNA
catagatttcttggcctttatgctgtggtgttgcgccacggtggagctttgtcaaatacacagcattaggttgcgacaaacggcagaagctggaggaggaagggcctgagtccgagcagaagaacctgcaggacctatcattcannnnnnnnaaagttctcccatcacatcaaccggtggcgcattgccacgaagcaggccaatggggaggacatcgatgtcacacaaccaaatataagaattgttagcaagaaatctatg

SEQ ID NO: 19729 - DNA, 261 bp, synthetic construct
  source 1..261: mol_type = other DNA
catagatttcttggcctttatgctgtggtgttgcgccacggtggagattggtcaaatacccatcattaggttgcgacaaacggcagaagctggaggaggaagggcctgagtccgagcagaagaacctgcaggacctatcattcannnnnnnnaaagttctcccatcacatcaaccggtggcgcattgccacgaagcaggccaatggggaggacatcgatgtcacacaaccaaatataagaattgttagcaagaaatctatg

SEQ ID NO: 19730 - DNA, 261 bp, synthetic construct
  source 1..261: mol_type = other DNA
catagatttcttggcctttatgctgtggtgttgcgccacggtggagattcgtcaaatacgcatcattaggttgcgacaaacggcagaagctggaggaggaagggcctgagtccgagcagaagaacctgcaggacctatcattcannnnnnnnaaagttctcccatcacatcaaccggtggcgcattgccacgaagcaggccaatggggaggacatcgatgtcacacaaccaaatataagaattgttagcaagaaatctatg

SEQ ID NO: 19731 - DNA, 261 bp, synthetic construct
  source 1..261: mol_type = other DNA
catagatttcttggcctttatgctgtggtgttgcgccacggtggagatttgtccaatacacatcattaggttgcgacaaacggcagaagctggaggaggaagggcctgagtccgagcagaagaacctgcaggacctatcattcannnnnnnnaaagttctcccatcacatcaaccggtggcgcattgccacgaagcaggccaatggggaggacatcgatgtcacacaaccaaatataagaattgttagcaagaaatctatg

SEQ ID NO: 19732 - DNA, 261 bp, synthetic construct
  source 1..261: mol_type = other DNA
catagatttcttggcctttatgctgtggtgttgcgccacggtggagatttgtcgaatacacatcattaggttgcgacaaacggcagaagctggaggaggaagggcctgagtccgagcagaagaacctgcaggacctatcattcannnnnnnnaaagttctcccatcacatcaaccggtggcgcattgccacgaagcaggccaatggggaggacatcgatgtcacacaaccaaatataagaattgttagcaagaaatctatg

SEQ ID NO: 19733 - DNA, 261 bp, synthetic construct
  source 1..261: mol_type = other DNA
catagatttcttggcctttatgctgtggtgttgcgccacggtggagatttgccaaatacacatcattaggttgcgacaaacggcagaagctggaggaggaagggcctgagtccgagcagaagaacctgcaggacctatcattcannnnnnnnaaagttctcccatcacatcaaccggtggcgcattgccacgaagcaggccaatggggaggacatcgatgtcacacaaccaaatataagaattgttagcaagaaatctatg

SEQ ID NO: 19734 - DNA, 261 bp, synthetic construct
  source 1..261: mol_type = other DNA
catagatttcttggcctttatgctgtggtgttgcgccacggtggagatttgtcaaatacacatcattaggttgcgacaaacggcagaagctggaggaggaagggcctgagtccgagcagaagaacctgcaggacctatcattcannnnnnnnaaagttctcccatcacatcaaccggtggcgcattgccacgaagcaggccaatggggaggacatcgatgtcacacaaccaaatataagaattgttagcaagaaatctatg

SEQ ID NO: 19735 - DNA, 20 bp, synthetic construct
  source 1..20: mol_type = other DNA
acctatcattcannnnnnnn

SEQ ID NO: 19736 - DNA, 20 bp, synthetic construct
  source 1..20: mol_type = other DNA
acctatcattcannnnnnnn

SEQ ID NO: 19737 - DNA, 20 bp, synthetic construct
  source 1..20: mol_type = other DNA
acctatcattcannnnnnnn

SEQ ID NO: 19738 - DNA, 20 bp, synthetic construct
  source 1..20: mol_type = other DNA
acctatcattcannnnnnnn

SEQ ID NO: 19739 - DNA, 20 bp, synthetic construct
  source 1..20: mol_type = other DNA
acctatcattcannnnnnnn

SEQ ID NO: 19740 - DNA, 20 bp, synthetic construct
  source 1..20: mol_type = other DNA
acctatcattcannnnnnnn

SEQ ID NO: 19741 - DNA, 20 bp, synthetic construct
  source 1..20: mol_type = other DNA
acctatcattcannnnnnnn

SEQ ID NO: 19742 - DNA, 20 bp, synthetic construct
  source 1..20: mol_type = other DNA
acctatcattcannnnnnnn

SEQ ID NO: 19743 - DNA, 20 bp, synthetic construct
  source 1..20: mol_type = other DNA
acctatcattcannnnnnnn

SEQ ID NO: 19744 - DNA, 20 bp, synthetic construct
  source 1..20: mol_type = other DNA
acctatcattcannnnnnnn

SEQ ID NO: 19745 - DNA, 20 bp, synthetic construct
  source 1..20: mol_type = other DNA
acctatcattcannnnnnnn

SEQ ID NO: 19746 - DNA, 20 bp, synthetic construct
  source 1..20: mol_type = other DNA
acctatcattcannnnnnnn

SEQ ID NO: 19747 - DNA, 20 bp, synthetic construct
  source 1..20: mol_type = other DNA
acctatcattcannnnnnnn

SEQ ID NO: 19748 - DNA, 20 bp, synthetic construct
  source 1..20: mol_type = other DNA
acctatcattcannnnnnnn

SEQ ID NO: 19749 - DNA, 20 bp, synthetic construct
  source 1..20: mol_type = other DNA
acctatcattcannnnnnnn

SEQ ID NO: 19750 - DNA, 20 bp, synthetic construct
  source 1..20: mol_type = other DNA
acctatcattcannnnnnnn

SEQ ID NO: 19751 - DNA, 20 bp, synthetic construct
  source 1..20: mol_type = other DNA
acctatcattcannnnnnnn

SEQ ID NO: 19752 - DNA, 20 bp, synthetic construct
  source 1..20: mol_type = other DNA
acctatcattcannnnnnnn

SEQ ID NO: 19753 - DNA, 20 bp, synthetic construct
  source 1..20: mol_type = other DNA
acctatcattcannnnnnnn

SEQ ID NO: 19754 - DNA, 20 bp, synthetic construct
  source 1..20: mol_type = other DNA
acctatcattcannnnnnnn

SEQ ID NO: 19755 - DNA, 20 bp, synthetic construct
  source 1..20: mol_type = other DNA
acctatcattcannnnnnnn

SEQ ID NO: 19756 - DNA, 20 bp, synthetic construct
  source 1..20: mol_type = other DNA
acctatcattcannnnnnnn

SEQ ID NO: 19757 - DNA, 20 bp, synthetic construct
  source 1..20: mol_type = other DNA
acctatcattcannnnnnnn

SEQ ID NO: 19758 - DNA, 20 bp, synthetic construct
  source 1..20: mol_type = other DNA
acctatcattcannnnnnnn

SEQ ID NO: 19759 - DNA, 20 bp, synthetic construct
  source 1..20: mol_type = other DNA
acctatcattcannnnnnnn

SEQ ID NO: 19760 - DNA, 20 bp, synthetic construct
  source 1..20: mol_type = other DNA
acctatcattcannnnnnnn

SEQ ID NO: 19761 - DNA, 20 bp, synthetic construct
  source 1..20: mol_type = other DNA
acctatcattcannnnnnnn

SEQ ID NO: 19762 - DNA, 20 bp, synthetic construct
  source 1..20: mol_type = other DNA
acctatcattcannnnnnnn

SEQ ID NO: 19763 - DNA, 20 bp, synthetic construct
  source 1..20: mol_type = other DNA
acctatcattcannnnnnnn

SEQ ID NO: 19764 - DNA, 20 bp, synthetic construct
  source 1..20: mol_type = other DNA
acctatcattcannnnnnnn

SEQ ID NO: 19765 - DNA, 20 bp, synthetic construct
  source 1..20: mol_type = other DNA
acctatcattcannnnnnnn

SEQ ID NO: 19766 - DNA, 20 bp, synthetic construct
  source 1..20: mol_type = other DNA
acctatcattcannnnnnnn

SEQ ID NO: 19767 - DNA, 20 bp, synthetic construct
  source 1..20: mol_type = other DNA
acctatcattcannnnnnnn

SEQ ID NO: 19768 - DNA, 20 bp, synthetic construct
  source 1..20: mol_type = other DNA
acctatcattcannnnnnnn

SEQ ID NO: 19769 - DNA, 20 bp, synthetic construct
  source 1..20: mol_type = other DNA
acctatcattcannnnnnnn

SEQ ID NO: 19770 - DNA, 20 bp, synthetic construct
  source 1..20: mol_type = other DNA
acctatcattcannnnnnnn

SEQ ID NO: 19771 - DNA, 20 bp, synthetic construct
  source 1..20: mol_type = other DNA
acctatcattcannnnnnnn

SEQ ID NO: 19772 - DNA, 20 bp, synthetic construct
  source 1..20: mol_type = other DNA
acctatcattcannnnnnnn

SEQ ID NO: 19773 - DNA, 20 bp, synthetic construct
  source 1..20: mol_type = other DNA
acctatcattcannnnnnnn

SEQ ID NO: 19774 - DNA, 20 bp, synthetic construct
  source 1..20: mol_type = other DNA
acctatcattcannnnnnnn

SEQ ID NO: 19775 - DNA, 20 bp, synthetic construct
  source 1..20: mol_type = other DNA
acctatcattcannnnnnnn

SEQ ID NO: 19776 - DNA, 20 bp, synthetic construct
  source 1..20: mol_type = other DNA
acctatcattcannnnnnnn

SEQ ID NO: 19777 - DNA, 20 bp, synthetic construct
  source 1..20: mol_type = other DNA
acctatcattcannnnnnnn

SEQ ID NO: 19778 - DNA, 20 bp, synthetic construct
  source 1..20: mol_type = other DNA
acctatcattcannnnnnnn

SEQ ID NO: 19779 - DNA, 20 bp, synthetic construct
  source 1..20: mol_type = other DNA
acctatcattcannnnnnnn

SEQ ID NO: 19780 - DNA, 20 bp, synthetic construct
  source 1..20: mol_type = other DNA
acctatcattcannnnnnnn

SEQ ID NO: 19781 - DNA, 20 bp, synthetic construct
  source 1..20: mol_type = other DNA
acctatcattcannnnnnnn

SEQ ID NO: 19782 - DNA, 20 bp, synthetic construct
  source 1..20: mol_type = other DNA
acctatcattcannnnnnnn

SEQ ID NO: 19783 - DNA, 20 bp, synthetic construct
  source 1..20: mol_type = other DNA
acctatcattcannnnnnnn

SEQ ID NO: 19784 - DNA, 20 bp, synthetic construct
  source 1..20: mol_type = other DNA
acctatcattcannnnnnnn

SEQ ID NO: 19785 - DNA, 20 bp, synthetic construct
  source 1..20: mol_type = other DNA
acctatcattcannnnnnnn

SEQ ID NO: 19786 - DNA, 20 bp, synthetic construct
  source 1..20: mol_type = other DNA
acctatcattcannnnnnnn

SEQ ID NO: 19787 - DNA, 20 bp, synthetic construct
  source 1..20: mol_type = other DNA
acctatcattcannnnnnnn

SEQ ID NO: 19788 - DNA, 20 bp, synthetic construct
  source 1..20: mol_type = other DNA
acctatcattcannnnnnnn

SEQ ID NO: 19789 - DNA, 20 bp, synthetic construct
  source 1..20: mol_type = other DNA
acctatcattcannnnnnnn

SEQ ID NO: 19790 - DNA, 20 bp, synthetic construct
  source 1..20: mol_type = other DNA
acctatcattcannnnnnnn

SEQ ID NO: 19791 - DNA, 20 bp, synthetic construct
  source 1..20: mol_type = other DNA
acctatcattcannnnnnnn

SEQ ID NO: 19792 - DNA, 20 bp, synthetic construct
  source 1..20: mol_type = other DNA
acctatcattcannnnnnnn

SEQ ID NO: 19793 - DNA, 20 bp, synthetic construct
  source 1..20: mol_type = other DNA
acctatcattcannnnnnnn

SEQ ID NO: 19794 - DNA, 20 bp, synthetic construct
  source 1..20: mol_type = other DNA
acctatcattcannnnnnnn

SEQ ID NO: 19795 - DNA, 20 bp, synthetic construct
  source 1..20: mol_type = other DNA
acctatcattcannnnnnnn

SEQ ID NO: 19796 - DNA, 20 bp, synthetic construct
  source 1..20: mol_type = other DNA
acctatcattcannnnnnnn

SEQ ID NO: 19797 - DNA, 20 bp, synthetic construct
  source 1..20: mol_type = other DNA
acctatcattcannnnnnnn

SEQ ID NO: 19798 - DNA, 20 bp, synthetic construct
  source 1..20: mol_type = other DNA
acctatcattcannnnnnnn

SEQ ID NO: 19799 - DNA, 20 bp, synthetic construct
  source 1..20: mol_type = other DNA
acctatcattcannnnnnnn

SEQ ID NO: 19800 - DNA, 20 bp, synthetic construct
  source 1..20: mol_type = other DNA
acctatcattcannnnnnnn

SEQ ID NO: 19801 - DNA, 20 bp, synthetic construct
  source 1..20: mol_type = other DNA
acctatcattcannnnnnnn

SEQ ID NO: 19802 - DNA, 20 bp, synthetic construct
  source 1..20: mol_type = other DNA
acctatcattcannnnnnnn

SEQ ID NO: 19803 - DNA, 20 bp, synthetic construct
  source 1..20: mol_type = other DNA
acctatcattcannnnnnnn

SEQ ID NO: 19804 - DNA, 20 bp, synthetic construct
  source 1..20: mol_type = other DNA
acctatcattcannnnnnnn

SEQ ID NO: 19805 - DNA, 20 bp, synthetic construct
  source 1..20: mol_type = other DNA
acctatcattcannnnnnnn

SEQ ID NO: 19806 - DNA, 20 bp, synthetic construct
  source 1..20: mol_type = other DNA
acctatcattcannnnnnnn

SEQ ID NO: 19807 - DNA, 20 bp, synthetic construct
  source 1..20: mol_type = other DNA
acctatcattcannnnnnnn

SEQ ID NO: 19808 - DNA, 20 bp, synthetic construct
  source 1..20: mol_type = other DNA
acctatcattcannnnnnnn

SEQ ID NO: 19809 - DNA, 20 bp, synthetic construct
  source 1..20: mol_type = other DNA
acctatcattcannnnnnnn

SEQ ID NO: 19810 - DNA, 20 bp, synthetic construct
  source 1..20: mol_type = other DNA
acctatcattcannnnnnnn

SEQ ID NO: 19811 - DNA, 20 bp, synthetic construct
  source 1..20: mol_type = other DNA
acctatcattcannnnnnnn

SEQ ID NO: 19812 - DNA, 20 bp, synthetic construct
  source 1..20: mol_type = other DNA
acctatcattcannnnnnnn

SEQ ID NO: 19813 - DNA, 20 bp, synthetic construct
  source 1..20: mol_type = other DNA
acctatcattcannnnnnnn

SEQ ID NO: 19814 - DNA, 20 bp, synthetic construct
  source 1..20: mol_type = other DNA
acctatcattcannnnnnnn

SEQ ID NO: 19815 - DNA, 20 bp, synthetic construct
  source 1..20: mol_type = other DNA
acctatcattcannnnnnnn

SEQ ID NO: 19816 - DNA, 20 bp, synthetic construct
  source 1..20: mol_type = other DNA
acctatcattcannnnnnnn

SEQ ID NO: 19817 - DNA, 20 bp, synthetic construct
  source 1..20: mol_type = other DNA
acctatcattcannnnnnnn

SEQ ID NO: 19818 - DNA, 20 bp, synthetic construct
  source 1..20: mol_type = other DNA
acctatcattcannnnnnnn

SEQ ID NO: 19819 - DNA, 20 bp, synthetic construct
  source 1..20: mol_type = other DNA
acctatcattcannnnnnnn

SEQ ID NO: 19820 - DNA, 20 bp, synthetic construct
  source 1..20: mol_type = other DNA
acctatcattcannnnnnnn

SEQ ID NO: 19821 - DNA, 20 bp, synthetic construct
  source 1..20: mol_type = other DNA
acctatcattcannnnnnnn

SEQ ID NO: 19822 - DNA, 20 bp, synthetic construct
  source 1..20: mol_type = other DNA
acctatcattcannnnnnnn

SEQ ID NO: 19823 - DNA, 20 bp, synthetic construct
  source 1..20: mol_type = other DNA
acctatcattcannnnnnnn

SEQ ID NO: 19824 - DNA, 20 bp, synthetic construct
  source 1..20: mol_type = other DNA
acctatcattcannnnnnnn

SEQ ID NO: 19825 - DNA, 20 bp, synthetic construct
  source 1..20: mol_type = other DNA
acctatcattcannnnnnnn

SEQ ID NO: 19826 - DNA, 20 bp, synthetic construct
  source 1..20: mol_type = other DNA
acctatcattcannnnnnnn

SEQ ID NO: 19827 - DNA, 20 bp, synthetic construct
  source 1..20: mol_type = other DNA
acctatcattcannnnnnnn

SEQ ID NO: 19828 - DNA, 20 bp, synthetic construct
  source 1..20: mol_type = other DNA
acctatcattcannnnnnnn

SEQ ID NO: 19829 - DNA, 20 bp, synthetic construct
  source 1..20: mol_type = other DNA
acctatcattcannnnnnnn

SEQ ID NO: 19830 - DNA, 20 bp, synthetic construct
  source 1..20: mol_type = other DNA
acctatcattcannnnnnnn

SEQ ID NO: 19831 - DNA, 20 bp, synthetic construct
  source 1..20: mol_type = other DNA
acctatcattcannnnnnnn

SEQ ID NO: 19832 - DNA, 20 bp, synthetic construct
  source 1..20: mol_type = other DNA
acctatcattcannnnnnnn

SEQ ID NO: 19833 - DNA, 20 bp, synthetic construct
  source 1..20: mol_type = other DNA
acctatcattcannnnnnnn

SEQ ID NO: 19834 - DNA, 20 bp, synthetic construct
  source 1..20: mol_type = other DNA
acctatcattcannnnnnnn

SEQ ID NO: 19835 - DNA, 20 bp, synthetic construct
  source 1..20: mol_type = other DNA
acctatcattcannnnnnnn

SEQ ID NO: 19836 - DNA, 20 bp, synthetic construct
  source 1..20: mol_type = other DNA
acctatcattcannnnnnnn

SEQ ID NO: 19837 - DNA, 20 bp, synthetic construct
  source 1..20: mol_type = other DNA
acctatcattcannnnnnnn

SEQ ID NO: 19838 - DNA, 20 bp, synthetic construct
  source 1..20: mol_type = other DNA
acctatcattcannnnnnnn

SEQ ID NO: 19839 - DNA, 20 bp, synthetic construct
  source 1..20: mol_type = other DNA
acctatcattcannnnnnnn

SEQ ID NO: 19840 - DNA, 20 bp, synthetic construct
  source 1..20: mol_type = other DNA
acctatcattcannnnnnnn

SEQ ID NO: 19841 - DNA, 20 bp, synthetic construct
  source 1..20: mol_type = other DNA
acctatcattcannnnnnnn

SEQ ID NO: 19842 - DNA, 20 bp, synthetic construct
  source 1..20: mol_type = other DNA
acctatcattcannnnnnnn

SEQ ID NO: 19843 - DNA, 20 bp, synthetic construct
  source 1..20: mol_type = other DNA
acctatcattcannnnnnnn

SEQ ID NO: 19844 - DNA, 20 bp, synthetic construct
  source 1..20: mol_type = other DNA
acctatcattcannnnnnnn

SEQ ID NO: 19845 - DNA, 20 bp, synthetic construct
  source 1..20: mol_type = other DNA
acctatcattcannnnnnnn

SEQ ID NO: 19846 - DNA, 20 bp, synthetic construct
  source 1..20: mol_type = other DNA
acctatcattcannnnnnnn

SEQ ID NO: 19847 - DNA, 20 bp, synthetic construct
  source 1..20: mol_type = other DNA
acctatcattcannnnnnnn

SEQ ID NO: 19848 - DNA, 20 bp, synthetic construct
  source 1..20: mol_type = other DNA
acctatcattcannnnnnnn

SEQ ID NO: 19849 - DNA, 20 bp, synthetic construct
  source 1..20: mol_type = other DNA
acctatcattcannnnnnnn

SEQ ID NO: 19850 - DNA, 20 bp, synthetic construct
  source 1..20: mol_type = other DNA
acctatcattcannnnnnnn

SEQ ID NO: 19851 - DNA, 20 bp, synthetic construct
  source 1..20: mol_type = other DNA
acctatcattcannnnnnnn

SEQ ID NO: 19852 - DNA, 20 bp, synthetic construct
  source 1..20: mol_type = other DNA
acctatcattcannnnnnnn

SEQ ID NO: 19853 - DNA, 20 bp, synthetic construct
  source 1..20: mol_type = other DNA
acctatcattcannnnnnnn

SEQ ID NO: 19854 - DNA, 20 bp, synthetic construct
  source 1..20: mol_type = other DNA
acctatcattcannnnnnnn

SEQ ID NO: 19855 - DNA, 20 bp, synthetic construct
  source 1..20: mol_type = other DNA
acctatcattcannnnnnnn

SEQ ID NO: 19856 - DNA, 20 bp, synthetic construct
  source 1..20: mol_type = other DNA
acctatcattcannnnnnnn

SEQ ID NO: 19857 - DNA, 20 bp, synthetic construct
  source 1..20: mol_type = other DNA
acctatcattcannnnnnnn

SEQ ID NO: 19858 - DNA, 20 bp, synthetic construct
  source 1..20: mol_type = other DNA
acctatcattcannnnnnnn

SEQ ID NO: 19859 - DNA, 20 bp, synthetic construct
  source 1..20: mol_type = other DNA
acctatcattcannnnnnnn

SEQ ID NO: 19860 - DNA, 20 bp, synthetic construct
  source 1..20: mol_type = other DNA
acctatcattcannnnnnnn

SEQ ID NO: 19861 - DNA, 20 bp, synthetic construct
  source 1..20: mol_type = other DNA
acctatcattcannnnnnnn

SEQ ID NO: 19862 - DNA, 20 bp, synthetic construct
  source 1..20: mol_type = other DNA
acctatcattcannnnnnnn

SEQ ID NO: 19863 - DNA, 20 bp, synthetic construct
  source 1..20: mol_type = other DNA
acctatcattcannnnnnnn

SEQ ID NO: 19864 - DNA, 20 bp, synthetic construct
  source 1..20: mol_type = other DNA
acctatcattcannnnnnnn

SEQ ID NO: 19865 - DNA, 20 bp, synthetic construct
  source 1..20: mol_type = other DNA
acctatcattcannnnnnnn

SEQ ID NO: 19866 - DNA, 20 bp, synthetic construct
  source 1..20: mol_type = other DNA
acctatcattcannnnnnnn

SEQ ID NO: 19867 - DNA, 20 bp, synthetic construct
  source 1..20: mol_type = other DNA
acctatcattcannnnnnnn

SEQ ID NO: 19868 - DNA, 20 bp, synthetic construct
  source 1..20: mol_type = other DNA
acctatcattcannnnnnnn

SEQ ID NO: 19869 - DNA, 20 bp, synthetic construct
  source 1..20: mol_type = other DNA
acctatcattcannnnnnnn

SEQ ID NO: 19870 - DNA, 20 bp, synthetic construct
  source 1..20: mol_type = other DNA
acctatcattcannnnnnnn

SEQ ID NO: 19871 - DNA, 20 bp, synthetic construct
  source 1..20: mol_type = other DNA
acctatcattcannnnnnnn

SEQ ID NO: 19872 - DNA, 20 bp, synthetic construct
  source 1..20: mol_type = other DNA
acctatcattcannnnnnnn

SEQ ID NO: 19873 - DNA, 20 bp, synthetic construct
  source 1..20: mol_type = other DNA
acctatcattcannnnnnnn

SEQ ID NO: 19874 - DNA, 20 bp, synthetic construct
  source 1..20: mol_type = other DNA
acctatcattcannnnnnnn

SEQ ID NO: 19875 - DNA, 20 bp, synthetic construct
  source 1..20: mol_type = other DNA
acctatcattcannnnnnnn

SEQ ID NO: 19876 - DNA, 20 bp, synthetic construct
  source 1..20: mol_type = other DNA
acctatcattcannnnnnnn

SEQ ID NO: 19877 - DNA, 20 bp, synthetic construct
  source 1..20: mol_type = other DNA
acctatcattcannnnnnnn

SEQ ID NO: 19878 - DNA, 20 bp, synthetic construct
  source 1..20: mol_type = other DNA
acctatcattcannnnnnnn

SEQ ID NO: 19879 - DNA, 20 bp, synthetic construct
  source 1..20: mol_type = other DNA
acctatcattcannnnnnnn

SEQ ID NO: 19880 - DNA, 20 bp, synthetic construct
  source 1..20: mol_type = other DNA
acctatcattcannnnnnnn

SEQ ID NO: 19881 - DNA, 20 bp, synthetic construct
  source 1..20: mol_type = other DNA
acctatcattcannnnnnnn

SEQ ID NO: 19882 - DNA, 20 bp, synthetic construct
  source 1..20: mol_type = other DNA
acctatcattcannnnnnnn

SEQ ID NO: 19883 - DNA, 20 bp, synthetic construct
  source 1..20: mol_type = other DNA
acctatcattcannnnnnnn

SEQ ID NO: 19884 - DNA, 20 bp, synthetic construct
  source 1..20: mol_type = other DNA
acctatcattcannnnnnnn

SEQ ID NO: 19885 - DNA, 20 bp, synthetic construct
  source 1..20: mol_type = other DNA
acctatcattcannnnnnnn

SEQ ID NO: 19886 - DNA, 20 bp, synthetic construct
  source 1..20: mol_type = other DNA
acctatcattcannnnnnnn

SEQ ID NO: 19887 - DNA, 20 bp, synthetic construct
  source 1..20: mol_type = other DNA
acctatcattcannnnnnnn

SEQ ID NO: 19888 - DNA, 20 bp, synthetic construct
  source 1..20: mol_type = other DNA
acctatcattcannnnnnnn

SEQ ID NO: 19889 - DNA, 20 bp, synthetic construct
  source 1..20: mol_type = other DNA
acctatcattcannnnnnnn

SEQ ID NO: 19890 - DNA, 20 bp, synthetic construct
  source 1..20: mol_type = other DNA
acctatcattcannnnnnnn

SEQ ID NO: 19891 - DNA, 20 bp, synthetic construct
  source 1..20: mol_type = other DNA
acctatcattcannnnnnnn

SEQ ID NO: 19892 - DNA, 20 bp, synthetic construct
  source 1..20: mol_type = other DNA
acctatcattcannnnnnnn

SEQ ID NO: 19893 - DNA, 20 bp, synthetic construct
  source 1..20: mol_type = other DNA
acctatcattcannnnnnnn

SEQ ID NO: 19894 - DNA, 20 bp, synthetic construct
  source 1..20: mol_type = other DNA
acctatcattcannnnnnnn

SEQ ID NO: 19895 - DNA, 20 bp, synthetic construct
  source 1..20: mol_type = other DNA
acctatcattcannnnnnnn

SEQ ID NO: 19896 - DNA, 20 bp, synthetic construct
  source 1..20: mol_type = other DNA
acctatcattcannnnnnnn

SEQ ID NO: 19897 - DNA, 20 bp, synthetic construct
  source 1..20: mol_type = other DNA
acctatcattcannnnnnnn

SEQ ID NO: 19898 - DNA, 20 bp, synthetic construct
  source 1..20: mol_type = other DNA
acctatcattcannnnnnnn

SEQ ID NO: 19899 - DNA, 20 bp, synthetic construct
  source 1..20: mol_type = other DNA
acctatcattcannnnnnnn

SEQ ID NO: 19900 - DNA, 20 bp, synthetic construct
  source 1..20: mol_type = other DNA
acctatcattcannnnnnnn

SEQ ID NO: 19901 - DNA, 20 bp, synthetic construct
  source 1..20: mol_type = other DNA
acctatcattcannnnnnnn

SEQ ID NO: 19902 - DNA, 20 bp, synthetic construct
  source 1..20: mol_type = other DNA
acctatcattcannnnnnnn

SEQ ID NO: 19903 - DNA, 20 bp, synthetic construct
  source 1..20: mol_type = other DNA
acctatcattcannnnnnnn

SEQ ID NO: 19904 - DNA, 20 bp, synthetic construct
  source 1..20: mol_type = other DNA
acctatcattcannnnnnnn

SEQ ID NO: 19905 - DNA, 20 bp, synthetic construct
  source 1..20: mol_type = other DNA
acctatcattcannnnnnnn

SEQ ID NO: 19906 - DNA, 20 bp, synthetic construct
  source 1..20: mol_type = other DNA
acctatcattcannnnnnnn

SEQ ID NO: 19907 - DNA, 20 bp, synthetic construct
  source 1..20: mol_type = other DNA
acctatcattcannnnnnnn

SEQ ID NO: 19908 - DNA, 20 bp, synthetic construct
  source 1..20: mol_type = other DNA
acctatcattcannnnnnnn

SEQ ID NO: 19909 - DNA, 20 bp, synthetic construct
  source 1..20: mol_type = other DNA
acctatcattcannnnnnnn

SEQ ID NO: 19910 - DNA, 20 bp, synthetic construct
  source 1..20: mol_type = other DNA
acctatcattcannnnnnnn

SEQ ID NO: 19911 - DNA, 20 bp, synthetic construct
  source 1..20: mol_type = other DNA
acctatcattcannnnnnnn

SEQ ID NO: 19912 - DNA, 20 bp, synthetic construct
  source 1..20: mol_type = other DNA
acctatcattcannnnnnnn

SEQ ID NO: 19913 - DNA, 20 bp, synthetic construct
  source 1..20: mol_type = other DNA
acctatcattcannnnnnnn

SEQ ID NO: 19914 - DNA, 20 bp, synthetic construct
  source 1..20: mol_type = other DNA
acctatcattcannnnnnnn

SEQ ID NO: 19915 - DNA, 20 bp, synthetic construct
  source 1..20: mol_type = other DNA
acctatcattcannnnnnnn

SEQ ID NO: 19916 - DNA, 20 bp, synthetic construct
  source 1..20: mol_type = other DNA
acctatcattcannnnnnnn

SEQ ID NO: 19917 - DNA, 20 bp, synthetic construct
  source 1..20: mol_type = other DNA
acctatcattcannnnnnnn

SEQ ID NO: 19918 - DNA, 20 bp, synthetic construct
  source 1..20: mol_type = other DNA
acctatcattcannnnnnnn

SEQ ID NO: 19919 - DNA, 20 bp, synthetic construct
  source 1..20: mol_type = other DNA
acctatcattcannnnnnnn

SEQ ID NO: 19920 - DNA, 20 bp, synthetic construct
  source 1..20: mol_type = other DNA
acctatcattcannnnnnnn

SEQ ID NO: 19921 - DNA, 20 bp, synthetic construct
  source 1..20: mol_type = other DNA
acctatcattcannnnnnnn

SEQ ID NO: 19922 - DNA, 20 bp, synthetic construct
  source 1..20: mol_type = other DNA
acctatcattcannnnnnnn

SEQ ID NO: 19923 - DNA, 20 bp, synthetic construct
  source 1..20: mol_type = other DNA
acctatcattcannnnnnnn

SEQ ID NO: 19924 - DNA, 20 bp, synthetic construct
  source 1..20: mol_type = other DNA
acctatcattcannnnnnnn

SEQ ID NO: 19925 - DNA, 20 bp, synthetic construct
  source 1..20: mol_type = other DNA
acctatcattcannnnnnnn

SEQ ID NO: 19926 - DNA, 20 bp, synthetic construct
  source 1..20: mol_type = other DNA
acctatcattcannnnnnnn

SEQ ID NO: 19927 - RNA, 113 nt, synthetic construct
  source 1..113: mol_type = other RNA
catagatttcttggcctttatgctgtggtgttgcgccacggtggagatttgtcaaatacacatcattaggttgcgcacaaccaaatataagaattgttagcaagaaatctatg

SEQ ID NO: 19928 - RNA, 177 nt, synthetic construct
  source 1..177: mol_type = other RNA
catagatttcttggcctttatgctgtggtgttgcgccacggtggagatttgtcaaatacacatcattaggttgcgcgcaattcgctacgctaccaatactgtgggcatatgccacagtattggtgctacgctgaagtgtcacaaccaaatataagaattgttagcaagaaatctatg

SEQ ID NO: 19929 - RNA, 243 nt, synthetic construct
  source 1..243: mol_type = other RNA
catagatttcttggcctttatgctgtggtgttgcgccacggtggagatttgtcaaatacacatcattaggttgcgacaaacggcagaagctggaggaggaagggcctgagtccgagcagaagaatcgtcagtgcaaagttctcccatcacatcaaccggtggcgcattgccacgaagcaggccaatggggaggacatcgatgtcacacaaccaaatataagaattgttagcaagaaatctatg

SEQ ID NO: 19930 - RNA, 307 nt, synthetic construct
  source 1..307: mol_type = other RNA
catagatttcttggcctttatgctgtggtgttgcgccacggtggagatttgtcaaatacacatcattaggttgcgcgcaattcgctacgctaccaatactgtgggcatacaaacggcagaagctggaggaggaagggcctgagtccgagcagaagaacgtaatccggaaagttctcccatcacatcaaccggtggcgcattgccacgaagcaggccaatggggaggacatcgatgtcaatgccacagtattggtgctacgctgaagtgtcacaaccaaatataagaattgttagcaagaaatctatg

SEQ ID NO: 19931 - DNA, 10 bp, synthetic construct
  source 1..10: mol_type = other DNA
ttacgtctgc

SEQ ID NO: 19932 - protein, 10 aa, synthetic construct
  REGION 5..6: note = Both of the S residues are connected by XTEN Linker
SGGSSSGGSS

SEQ ID NO: 19933 - DNA, 11 bp, synthetic construct
  source 1..11: mol_type = other DNA
gtcaatggacc

SEQ ID NO: 19934 - DNA, 11 bp, synthetic construct
  source 1..11: mol_type = other DNA
ggtccattgac

SEQ ID NO: 19935 - DNA, 33 bp, synthetic construct
  source 1..33: mol_type = other DNA
gccaacatgaggatcacccatgtctgcagggcc

SEQ ID NO: 19936 - protein, 4 aa, synthetic construct
LTLD

SEQ ID NO: 19937 - protein, 4 aa, synthetic construct
LTLA

SEQ ID NO: 19938 - protein, 4 aa, synthetic construct
LTQV

SEQ ID NO: 19939 - protein, 4 aa, synthetic construct
EQHG

SEQ ID NO: 19940 - protein, 4 aa, synthetic construct
RDHG

SEQ ID NO: 19941 - protein, 4 aa, synthetic construct
LTPD

SEQ ID NO: 19942 - protein, 5 aa, synthetic construct
NQALE

SEQ ID NO: 19943 - protein, 5 aa, synthetic construct
KRALE

SEQ ID NO: 19944 - protein, 4 aa, synthetic construct
LTPE

SEQ ID NO: 19945 - protein, 7 aa, synthetic construct
NGKQALE

SEQ ID NO: 19946 - protein, 4 aa, synthetic construct
  REGION >4: note = The entire sequence of amino acids 1-4 can be repeated one to thirty times
GGGS

SEQ ID NO: 19947 - protein, 4 aa, synthetic construct
GGGS

SEQ ID NO: 19948 - protein, 5 aa, synthetic construct
GGGGS

SEQ ID NO: 19949 - protein, 6 aa, synthetic construct
  REGION >3: note = The entire sequence of amino acids 1-3 can be repeated three or more times
GGSGGS

SEQ ID NO: 19950 - protein, 5 aa, synthetic construct
  REGION >5: note = The entire sequence of amino acids 1-5 can be repeated three or more times
GGGGS

SEQ ID NO: 19951 - protein, 5 aa, synthetic construct
  REGION >5: note = The entire sequence of amino acids 1-5 can be repeated one to eleven times
GGGGS

SEQ ID NO: 19952 - protein, 11 aa, synthetic construct
YGRKKRRQRRR

SEQ ID NO: 19953 - protein, 9 aa, synthetic construct
LAGLIDADG

SEQ ID NO: 19954 - DNA, 12 bp, synthetic construct
  source 1..12: mol_type = other DNA
gaagggaaagtt

SEQ ID NO: 19955 - protein, 52 aa, synthetic construct
IPSEGLVINSKKTCISGPRSQRKVTGLVISQEKVGIGREKYKEIRAKIHHIF

SEQ ID NO: 19956 - protein, 52 aa, synthetic construct
MKEPDFKINIKKFKICSAGGSIVVTGLKVCHDHITLHRSMKDKIRLHLSLLS

SEQ ID NO: 19957 - protein, 51 aa, synthetic construct
LGKHGFLMNLDKCRVYNPGQPKRITGLTVHNRVSVPKTFKRKLRQEIHYCQ

SEQ ID NO: 19958 - protein, 52 aa, synthetic construct
LEAEGFTLHPDKTRVQRKGSRQRVTGLVVNEAPARVPRDVVRRLRAAIHNRE

SEQ ID NO: 19959 - protein, 52 aa, synthetic construct
VKEEGFNINKDKTKFLRKNNRQCITGIVINNEEIGVPKKWIKILRAAIYNAN

SEQ ID NO: 19960 - protein, 51 aa, synthetic construct
ISNSGFTINQSKTRLLYRDSRQEVTGLVVNKKIGVNREYVKSTRAMAQSTG

SEQ ID NO: 19961 - protein, 52 aa, synthetic construct
INDEGFEVNDTKTKLYLKAGKRIVTGISVIGNDPKLPREYKRKLKQELHYIF

SEQ ID NO: 19962 - protein, 51 aa, synthetic construct
LLSAGFTLNRQKQRIASDNSRQVVTGILVNESIRPTRCYRKKIRSAFDHAL

SEQ ID NO: 19963 - protein, 52 aa, synthetic construct
LRDEGFTPHPDKERVMRKGRRQEVTGLVVNSDTPSVSRETRRRLRAALHRAS

SEQ ID NO: 19964 - protein, 52 aa, synthetic construct
FRENNFLINEKKTRVRKNKHTKIVTGIVVSQYGVRIPQKYYRRLNKELYYCQ

SEQ ID NO: 19965 - protein, 51 aa, synthetic construct
LERYDYKPNKNKTNIVSGNKRKMVTGIIVNDKIKVPKRFKNKLRQEIYYCK

SEQ ID NO: 19966 - protein, 52 aa, synthetic construct
ISNDGWIVANEKTHIAIAPNRLKVHGFLVHAVTPRLTKGYRNKIRAYTHLLN

SEQ ID NO: 19967 - protein, 52 aa, synthetic construct
LSKYDFIINNKKTRLLKDRHTKIVTGLVITPQGVRIPQKYIRRLNKEIYYCK

SEQ ID NO: 19968 - protein, 51 aa, synthetic construct
LAELGLSLNKRKGCLIAACKRQQVTGIVVNHKPQLAREARRALRQEVHLCQ

SEQ ID NO: 19969 - DNA, 50 bp, synthetic construct
  source 1..50: mol_type = other DNA
  repeat_region >50: note = A residue can be repeated one or more times
aaaaaaaaaaaaaaaaaaaaaaaaaaaaaaaaaaaaaaaaaaaaaaaaaa

SEQ ID NO: 19970 - RNA, 165 nt, synthetic construct
  source 1..165: mol_type = other RNA
nyyyttnngcnnnnrrrnnnnnnnnnnnnnnyyyngtcnggygnttngccagacnnnrnnnnattgnnnrnnnttrnnnnyrcgnnrnnnnnnnnnnnnnnnnnnnnnnnnnnnnnnnnnnnnnnnnnnnnnnnnnnnnnnynncgynnnytynagnnaarrrnn

SEQ ID NO: 19971 - RNA, 150 nt, synthetic construct
  source 1..150: mol_type = other RNA
tannntnnnnnyatryyrrygactggagyatctccagtcrnnnnnnyyggycyctannrgynnynanyynnnnttrynnnyrynynnnnnnnnnnnnnnnnnnnnnnnnnnnrnryrnnnrtarnnnnnnnnnnnnnnnnnnnnnnnynn

SEQ ID NO: 19972 - RNA, 186 nt, synthetic construct
  source 1..186: mol_type = other RNA
nntrrtatnrtnrrnnanryttcnnyynygatagnnnnnrgggrnynnnnnnnnnnrnynnrnnnnnnnnynnnnyyagyyynnnnnnnnnnnnnynnnnnnnnnnnnnnnnnnnnrnnyntynrrnnynacrnnngtgnaanrntgtnnttngtatcrnrrnngaarynnnnnnatgaanaannn

SEQ ID NO: 19973 - RNA, 131 nt, synthetic construct
  source 1..131: mol_type = other RNA
nrrcntryrgnyagatttnnnnnyyrygyntcgyrrnnnntganrnnaaygnynrrnnnnntnnnnnnnnnnynnnnnnnnnnnnnnnnnnnnnnnnnnnnnnnnnnnygcryargagtrncyryangyyn

SEQ ID NO: 19974 - RNA, 159 nt, synthetic construct
  source 1..159: mol_type = other RNA
nnrnyyyttagynnnnnrannnnnnnnnnnnnnnnntynngycnggygtnnagccagrcynnnnynnattgnnrrnnttnnnngyrnnnnnnnnnnnnnnnnnnnnnnnnnnnnnnnnnnnnnnnnnnnnnnnnnnnnyncnynnnngtarrrrnynnn

SEQ ID NO: 19975 - RNA, 165 nt, synthetic construct
  source 1..165: mol_type = other RNA
nnnnnnnnnnnrnnnnngrnnnrngnnncnynnnyynnnnnnnnnrrnnnnnnnnnnnnnnnnnnnnngyggccarnrrnnncnnnnnynnnnnnnnnnnnnnnnnnnnnngnnnyynytggccrcnnnyynnnnnnnnnnnnnnnnnnnnnnnnnnnnnnnnnn

SEQ ID NO: 19976 - RNA, 151 nt, synthetic construct
  source 1..151: mol_type = other RNA
yyyttagnnnnnnnnnnnnnnnnnnnnnnnnnnyggrnrrtgnttcgyynyccnnnrnnnaannynnnnnnnnrnynnnynnrrnnnnnnnnnnnnnnnnnynnnnrnnnnnnnnnnnnnnnnnyynnnnnnrnnnnntnnrnngtaarrr

SEQ ID NO: 19977 - RNA, 229 nt, synthetic construct
  source 1..229: mol_type = other RNA
rrcntnynnngyyrccttagcnnytaaggttrrngyanyyannannnngtnaaattnnnnnnrrctnncryynaynnttynnnnnnnnrnnnnnnnnnynnnnrnnncnnynnrnnnnnrcnrnctnngytynnnynnngarcnynnnnnnnnnnnnnnynnnnnnarnnaanynnynnnnaatttnagtaggrytcytyttnnnnnnnrrrrrnnryrnnnatrnrnn

SEQ ID NO: 19978 - RNA, 205 nt, synthetic construct
  source 1..205: mol_type = other RNA
nrnnrrnngnnnnnnnnnnnnnnnnntnggnygnygnntcrncrnycnnrnnnnnagrynnnnynnnnnrrrnnnyrnnnnnnnnrnnnnnnnnnnnnnnnnnnnnnnnnnnnnnnnnnnnnnnnnnnnnynnnnnnnncrnnynynrrgcaryynnnnnnnnnytggnnnnnnnnnnnnnnnncnnyynnynnnynnnnnnnnn

SEQ ID NO: 19979 - RNA, 140 nt, synthetic construct
  source 1..140: mol_type = other RNA
ynrrnnnnnnnnnnnnnnnnnnnnnnnnnnnngrnyrrygagtcryyrnycnnnnnrngaaynnnntttcragcnnnnnnnnnnnnnnnnnnnnnnnnynrrrnnnnnnnnnnnnnnnnnnnnnnnnnnnnnnnnnnnrn

SEQ ID NO: 19980 - RNA, 203 nt, synthetic construct
  source 1..203: mol_type = other RNA
ngnnnrnnrrnrytagyannnngrrgtgnantcgcyyynnnnrytnaggynnnynttanccnnnnnnnnnnnnnnnnnnnnnnnnnnnnnnnnnnnnnnnnnnnnnnnnnnnnnnnnnnnnnnnnnnnnnnnnnnnnnnnnnnnnnnnnnnnnnnnnnnnnynnnnnnnnnnrnnnnnnnnnnrnnrgtarynnnnnynnnyy

SEQ ID NO: 19981 - RNA, 225 nt, synthetic construct
  source 1..225: mol_type = other RNA
rntgagrrnnyyrnnnnnnnnryytagynnnnnnnnnnnnnnnnnnnnnnnnnnnnnnnnnnnnnnnnnnnnnnnnngrrnnnnrrrnynnyrnnnyyynnngrnnarcnnnygynnnnnnnnnnnnnnnnnnnrnnnnnnnnnnnnnnnnnnnngynyynnnnnnnnnnnynnnnnnnnnyncnnnnnnngnnyyraagtarrtgnnnnnnyrrnnyyctcanc

SEQ ID NO: 19982 - RNA, 129 nt, synthetic construct
  source 1..129: mol_type = other RNA
rytagcnnynnynnnnnnnnnnnnnnnrrrnnnyynnrnynnntnrnynnrrnnnnnntraagynacyttnyanyrnynnnnryrnaayrynnnnnnnnnnnnnnnnnnyynyrynnnnnnyrcnnnry

SEQ ID NO: 19983 - RNA, 187 nt, synthetic construct
  source 1..187: mol_type = other RNA
nryrnynnytagaanngarnrrcragtygyynytcnnngnnnnaangyynctnnntnnnnnnnrnrnnrrnnnnnnnnnnnnnyynnynynnnnnnnnnnnnnnnnnnnnnnnnnnnnnnnnnnnnnnnnnnnnnnnnnnnnnnnnnnnnnnnnnnnnnnnnrnnnnnrrnnynrgtarnrrntryn

SEQ ID NO: 19984 - RNA, 177 nt, synthetic construct
  source 1..177: mol_type = other RNA
rrnrnynrytagnntnnnrnrgyrantygcynynnnnnnnnrnnangnnnctaanynnynnnnnnnnnnynrnynnnnnnnnnnnnnrnrnynnnnnnnnnnnnnnnnnnnnnnnnnnnnnnnnnnnnnnnnnnnnnnnnnnnnnnnnnnnnnnnnnnnnnnnnngtarynrnynyn

SEQ ID NO: 19985 - RNA, 148 nt, synthetic construct
  source 1..148: mol_type = other RNA
nnynnyyrrnnnngcyynnnnnnnnrrgcgyyynnnnnnnnnnnnnnrrrcnyrynngrrgrnnnnnnnnnnnnynnnncyyynnnnnnnnrnagnagnnnnngryrntrrryyyrgycrnrnrrrrnnrnggcngynnyyrrnnnnn

SEQ ID NO: 19986 - RNA, 168 nt, synthetic construct
  source 1..168: mol_type = other RNA
nnnannnnnnnnnngyggnrrynyynngcgngrgtgtgyatcaygcycryyngcnaagryyrnnnayagaaggryrncngnnnnnnrncnrnygntccttcgrancnyynrnynnnnnncngncnnynnnnrrrarnnnnnnrrctttgctnnrnrrnnyynccrcnn

SEQ ID NO: 19987 - RNA, 190 nt, synthetic construct
  source 1..190: mol_type = other RNA
ynynnnrryyaatnnnnntrttyyynnnnnnnnnnnnnttggtctggcnnnnnnrnnynnnnnnnnnnnrnyrrnrnnrrnnnnnnnaygnnnnrnnynannntnranntnnnnnynrynnnnnnnrnnragarcnynnnnnnnnnnnynnragnnrrnnnnnnnnnnranrrnnrrrttgryynnrrnr

SEQ ID NO: 19988 - RNA, 143 nt, synthetic construct
  source 1..143: mol_type = other RNA
ycrynnnnnnyngrrnnnnnnnnnnyyygyggrrrnnnnnnnnnnyytctrnynyytnynnnnnnnnnnnnnnnnnnnnnnnnnnnnnnnnnnnnnnnnrnnnrnrnnnnrnnyynnnrngrnnnnrrnnynnnnnnnnnrrr

SEQ ID NO: 19989 - RNA, 125 nt, synthetic construct
  source 1..125: mol_type = other RNA
nnnnnyacgrggtctcccytcncanncrcgcyrnnnnnnnnryggcgyrnrnnnnnnygtnnnnrynnnnncnynyrcgccryrnnnnrnnnnnnyrgcgygnntggargggagaccycgtrnnn

SEQ ID NO: 19990 - RNA, 142 nt, synthetic construct
  source 1..142: mol_type = other RNA
nnnnrynnnynnnnnnrnrttranyynnryygynnynanygcrrynnnnnnnnnaangynnnnnnnnnnnnnnncnnnnnnnnnnnnnnnnnnnnnnnnnnnnnnnnnnnnnnrtarngnrarnnyrnnnnrnnnrynyyny

SEQ ID NO: 19991 - RNA, 139 nt, synthetic construct
  source 1..139: mol_type = other RNA
nnrnryyycnnyyynnnnnnnnnnnygnngtygnnnyyrcnncrrnnnnnnnaaygtnnnynynyrnnnnnnnnnnnnnnrnnnnnnnnnnnnnnnnnnnnnnnnnnnnnrnrnaargtrnnygnrgnngrrrynyyny

SEQ ID NO: 19992 - RNA, 221 nt, synthetic construct
  source 1..221: mol_type = other RNA
nnrnnrnnnnnnnnnnnnnyyngcnnnnnnnnnryggygnnncgccrynnnngnnnnnnnnynnnnnnyncnycncnrrnnnnnyynynnynnngnnnnnnnnnnnnnnnnnnnnnnnnnnnnnnnnnnnnnnnnnnnnnnnnnnnnnnnnnnnnnnnnnnnnnnncnnnngtnrrnnnnyynngtcynnrgnnnnnnngnrgnnnnnnnnnnnnnynnyn

SEQ ID NO: 19993 - RNA, 205 nt, synthetic construct
  source 1..205: mol_type = other RNA
ryynrnnnnnanntnttganyynygynyrnygnnnntygnyrnrtnnyyynnnnnnnnnnnrrrntnaaygtynnnnnnnnannnnnnnnnnnnnnnnnnnnnnnnnnnnnnnnnnnnnnnnnnnnnnnnnnnnnnnnnnnnnnnnnnnnnnnnnnnnnnnnnnnnnnnnnnnnnnnnnyrtanayaaagaanannnnnnynrry

SEQ ID NO: 19994 - RNA, 177 nt, synthetic construct
  source 1..177: mol_type = other RNA
nnnnnrrcrryagynnnnnynnnnnnnnnnnnrnnnngryrgcgagtcgcyryynnnnnnnnnnnnnnnnnnnnnnnnnnnnnnnnnnnnnnnnnnyrctynrnngnannnnnryncaynnyrtgnrynnnnnnntncrnctncrynnynynnnrnnnnnnnyngtryygyynnnnn

SEQ ID NO: 19995 - RNA, 140 nt, synthetic construct
  source 1..140: mol_type = other RNA
nncragnnnnnnnnnnnnnnnnnnnnnnnnnnnnnctnyggggynaccccrnggnnnnnnnnnnnnnynnnnynnnncrnygcrngnnnnnnnnyrcgcnnyrcgyrnnnnnnnncnygcnnnrcnrgnynngtygnnnn

SEQ ID NO: 19996 - RNA, 40 nt, synthetic construct
  source 1..40: mol_type = other RNA
cctgagtccgagcagaagaagaagggctcccatcacatca

SEQ ID NO: 19997 - RNA, 40 nt, synthetic construct
  source 1..40: mol_type = other RNA
cctgagtccgagcagaagaaagaagggctcccatcacatc

SEQ ID NO: 19998 - RNA, 37 nt, synthetic construct
  source 1..37: mol_type = other RNA
cctgagtccgagcagaagaagggctcccatcacatca

SEQ ID NO: 19999 - RNA, 34 nt, synthetic construct
  source 1..34: mol_type = other RNA
cctgagtccgagcagaagggctcccatcacatca

SEQ ID NO: 20000 - RNA, 14 nt, synthetic construct
  source 1..14: mol_type = other RNA
ctcccatcacatca

SEQ ID NO: 20001 - RNA, 39 nt, synthetic construct
  source 1..39: mol_type = other RNA
cctgagtccgagcagaagagaagggctcccatcacatca

SEQ ID NO: 20002 - RNA, 19 nt, synthetic construct
  source 1..19: mol_type = other RNA
cctgagtcccatcacatca

SEQ ID NO: 20003 - RNA, 40 nt, synthetic construct
  source 1..40: mol_type = other RNA
cctgagtccgagcagaagaattacgtctgcaaagttctcc
